United States Patent Application Publication US 2021/0247394 A1 - sequence listing, part 3

SEQ ID NO: 1 - DNA, 4913040 bp, Escherichia coli (residues 3,275,361-4,913,040 of 4,913,040)
  modified_base (1004902)..(1005000): a, c, t, g, unknown or other
  modified_base (2674793)..(2674889): a, c, t, g, unknown or other
  modified_base (3346738)..(3346746): a, c, t, g, unknown or other
  modified_base (4136806)..(4136812): a, c, t, g, unknown or other
  modified_base (4610591)..(4610688): a, c, t, g, unknown or other
  modified_base (4885427)..(4885828): a, c, t, g, unknown or other
cgggttttcgatctgctgctgaattgcacgtttcagaggacgtgcaccatagaccggatcgtaaccgttctcgctcagcagtttcagcgcctcgtcagaaatgtggatttcataaccacgttcttccagacgtttgtacagacgtttcaactgaatctgcgcaatcgaggcaatgtgctgttcacccagcggatggaagaccaccacttcatcgatacggttaatgaattccggacggaagttatggcttaccacaccgagcaccagctctttcatgtgcgcataatccagttcaccgaagcgttcctgaatcagatcggaaccgaggttagaggtcataatgacgaccgtattacggaagtcgaccgttctcccttgcccgtcagtcagacgcccatcatccagtacctgcaacagaatgttgaagacatccggatgcgctttttccacttcatccagcaggatgacggaatacggacgacgacgcaccgcttcggtcaggtagccaccttcttcataaccgacatatcccggaggcgcaccaaccaaacgagacaccgagtgtttctccataaactcggacatatcgatacggaccatcgcctcgtcgctatcaaacataaagttcgccagcgccttacaaagctctgttttccccacaccagttgggccgaggaacaggaatgaaccaatcgggcgatttggatccgccagccccgcacggctacgacgaatagcgttagataccgcatcaaccgcttcgttctgaccaattacgcgatggtgcagttcttgctccatacgcagcagtttttcgcgctcgctttccatcatgcgagaaaccggaatccccgtccaacgcgccagcacttcagcaatttcggcgtcggtcactttattacgcaacagacgcatagttttgccttcgagctgcgttgcggcttccagttgcttttccagttccgggattttgccgtattgcagttcagacatccgcgccaggtcccccacacggcgagcctgttcaatagcgattttcgcctgttccagttccgctttaatggtctgcgtaccagaaagcgatgccttctctgctttccactcttcttctaactcggagtactgacgttctttgtcgctcagttcttcgttgagcatatccagacgttttttactggcttcatcagactctttcattaacgcctgttgttccagtttgagctggatgatacgacgatcgagtcggtcgagttcttctggttttgagtcaatctgcatacgaatgctggatgctgcttcatcgatcaggtcgatggctttatccggcagctgacggtcagcaatgtagcgatgagacaacgtcgccgctgcaacaattgccgggtcagtaatttgcacatggtggtgcaattcgtaacgttctttcaggccacgcagaatcgcaatggtatcttcaacagaaggctcggcaacaaacactttctggaaacgacgttccagcgcagcatctttttcaatgtactggcgatattcgtcaagcgtcgtggcacctacgcagtgcaattcaccacgcgccagcgccggtttcagcatgtttccggcgtccattgcgccatcggctttacccgcgccgaccatggtatgtaattcgtcgataaataggatgacgttgccttcctgtttggcaagatcgttaagcacgccttttaaacgttcttcaaactcaccgcgatatttcgccccagccaccagcgcgcccatatccagcgccagtacccggcggcctttcaacccttccggcacttcgccgttgataatacgctgcgccagaccttcaacgatggcagttttaccgacgccgggttcaccaatcagtaccgggttatttttagtacgacgttgcagcacctgaatggtacggcgaatttcttcatcacgaccaatcaccggatcgagtttgccctgttcggctcgttcggtaaggtcgatggtatattttttcaaagcctgacgttggtcttcagcaccttgatcgttcacgctttcacctccacgcatttgttcaatcgcttgagtaatgttggcggtggtcgcccctgctgctttcaggatgtcggccagcgtgccgcgagactcaagtgccgccagaacgaacagttctgacgagataaagttatcaccacgtttttgcgccagcttgtcgcaaagattaagaacgcgcaccagatcctgtgatggctggacatcaccaccagtaccttcaacctgcggtaaacgatttaatgcctgattgatatctgtgcgcaactggccagcatttatgccagcggatgttaataaaggactaaccgaacccccttcctgattcagcagggcgctcattaaatgaagtggttcgataaattggttgtcgtgcccgagtgcaagtgattgggcatcggcaagagcaagctggaatttattagtaagacgatccagacgcataactcctcccataacggatcaaagttgctactggagattaaatgaggtcatccctcaattattcaaggttattgaccagattaatgtgaaaagaaaatcacgcgtaccggatcgtcttgattctttaggttatatcagccaaatgaaacttgccatacgaccggtggtcttgtcgcgacgataagagaagaaagtctcattttccgtatatgtacaacggtcgccgccgaaaatttgctcaacacccacgttcgccagacgctgccgggcaagctgataaatatccgccagatacttatcaccatgctgaatgaaagctgcacttgctttagcgtctactgccataaacgcctcgcgaacctccccccccacttcgaacgcgcgtggaccaattgccggccctaaccaggcgagaatattttccggattatcagcaaaacaggaaaccgtctcttccagcacgcctgcgcacagtccacgccagccagcatgagcggcggcgacttccgttcccgctcgattgcaaaacagcacagggaggcagtcggcagtcatcactgcgcaaaccgtgccgggcgtattgctataagaggcatccgcccgttttgaggcataaggttcgccagtgagcttaagcacatctttgccgtgtacctgctcaagccagaccggtttagaaggcaaattgcccgcagcaaaaagtcgcttgcgattctcctcaacgtgatccgggttatcgccacaatgggcaccgaggttgagtgagtcatacgggggcaagctcacgccgccgatacgagtggagctacaggccgcaacaccttttggctgcggccactgcgggacaatcagcttactcataaccagtccacttcatccttatgttcttcgaaatcggcgcgcatcacctcaatcagctccaccatatcttgtggaataggcgcatgccattccatttcgatgccggagatcgggtgataaagacgcagcatggttgcatgtagcgcctggcggtcaaacttacgcagcgtggagataaatgcttccgaagcaccttttggcggacgcggacggccaccataaaccggatcgcccaccagcggatgagtgatatgggccatatgcacgcggatctggtgcgtacgtccagtttccagacgcaaccgcagacgcgtgtgcacacggaagtgttccatgatgcgatagtgagtcaccgctggtttgcccatcggatgcaccgccatatgggtacgtttggtcgggtggcgactgattggctcgtccaccgtgccacctgcggtcatatgaccaatcgccaccgcttcatactcacgagtaatttcacgccgttgcaaagattcgactaaacgcgtctgagccggaacggtttttgccacaaccatcaggccagtggtgtctttatccagacgatggacgatgcccgcacgcggtacatcggcaatgggtggatagtaatgaagcaacgcattcagtaccgtgccatccgggttacccgcgccaggatgtaccaccaggtcgcgcggtttattaatgataataatgtcttcatcttcatagacgatatccagcgggatatcctgcggttcaaaacgcgcttcttcttcaatctcagcgttgatggcaacctgctcgccacccaatactttttctttcggcttatcacaaactttgccgttaaccagcactcgctggtcgaggatccattcttttattcgcgaacgtgaataatccgggaacatttcggccaaagcctgatctaagcgttgaccgagttggttttcggacaccgttgcagtgagctgtactcgttgtgccatatatactgcttcttcgtttatcgttggggttttacggctttgccgtttaatatagtgtgctattgtagctggtcttaaccgggagcaggaacagagaatctcccgtattacattttgaggaaagtcaaaacgtcatgacgcgcatgaaatatctggtggcagccgccacactaagcctgtttttggcgggttgctcggggtcaaaggaagaagtacctgataatccgccaaatgaaatttacgcgactgcacaacaaaagctgcaggacggtaactggagacaggcaataacgcaactggaagcgttagataatcgctatccgtttggtccgtattcgcagcaggtgcagctggatctcatctacgcctactataaaaacgccgatttgccgttagcacaggctgccatcgatcgttttattcgccttaacccgacccatccgaatatcgattatgtcatgtacatgcgtggcctgaccaatatggcgctggatgacagtgcgctgcaagggttctttggcgtcgatcgtagcgatcgcgatcctcaacatgcacgagctgcgtttagtgacttttccaaactggtgcgcggctatccgaacagtcagtacaccaccgatgccaccaaacgtctggtattcctgaaagatcgtctggcgaaatatgaatactccgtggccgagtactatacagaacgtggcgcatgggttgccgtcgttaaccgcgtagaaggcatgttgcgcgactacccggatacccaggctacgcgtgatgcgctgccgctgatggaaaatgcataccgtcagatgcagatgaatgcgcaagctgaaaaagtagcgaaaatcatcgccgcaaacagcagcaatacataacagaaacctgaaacacaaaacggcagcccttgagctgccgtttttttattctgtcagttgtgaaactgaagcgatttagtcgctatcgatctcatcaaatatggctcgctttgagatattcctcaagtaaaaaaacatctcttcctgcgatttctcacaaaaaagattcgttgacaaaaagtgacaaaattatgagattttcatcacacattttgacatcaggaacggtatgctgaattcaccaagacgggaagacaagaggtaaaatttatgacaatgaacattaccagcaaacaaatggaaattactccggccatccgccaacatgtcgcagaccgtctcgccaaactggaaaaatggcaaacacatctgattaatccacatatcattctgtccaaagagccacaagggtttgttgctgacgccacaatcaatacacctaacggcgttctggttgccagtggtaaacatgaagatatgtacaccgcaattaacgaattgatcaacaagctggaacggcagctcaataaactgcagcacaaaggcgaagcacgtcgtgccgcaacatcggtgaaagacgccaacttcgtcgaagaagttgaagaagagtagtcctttatattgagtgtatcgccaacgcgccttcgggcgcgttttttgttgacagcgtgaaaacagtacgggtactgtactaaagtcacttaaggaaacaaacatgaaacacataccgtttttcttcgcattcttttttaccttcccctgaatgggaggcgtttcgtcgtgtgaaacagaatgcgaagacgaacaataaggcctcccaaatcggggggccttttttattgataacaaaaaggcaacactatgacatcggaaaacccgttactggcgctgcgagagaaaatcagcgcgctggatgaaaaattattagcgttactggcagaacggcgcgaactggccgtcgaggtgggaaaagccaaactgctctcgcatcgcccggtacgtgatattgatcgtgaacgcgatttgctggaaagattaattacgctcggtaaagcgcaccatctggacgcccattacattactcgcctgttccagctcatcattgaagattccgtattaactcagcaggctttgctccaacaacatctcaataaaattaatccgcactcagcacgcatcgcttttctcggccccaaaggttcttattcccatcttgcggcgcgccagtatgctgcccgtcactttgagcaattcattgaaagtggctgcgccaaatttgccgatatttttaatcaggtggaaaccggccaggccgactatgccgtcgtaccgattgaaaataccagctccggtgccataaacgacgtttacgatctgctgcaacataccagcttgtcgattgttggcgagatgacgttaactatcgaccattgtttgttggtctccggcactactgatttatccaccatcaatacggtctacagccatccgcagccattccagcaatgcagcaaattccttaatcgttatccgcactggaagattgaatataccgaaagtacgtctgcggcaatggaaaaggttgcacaggcaaaatcaccgcatgttgctgcgttgggaagcgaagctggcggcactttgtacggtttgcaggtactggagcgtattgaagcaaatcagcgacaaaacttcacccgatttgtggtgttggcgcgtaaagccattaacgtgtctgatcaggttccggcgaaaaccacgttgttaatggcgaccgggcaacaagccggtgcgctggttgaagcgttgctggtactgcgcaaccacaatctgattatgacccgtctggaatcacgcccgattcacggtaatccatgggaagagatgttctatctggatattcaggccaatcttgaatcagcggaaatgcaaaaagcattgaaagagttaggggaaatcacccgttcaatgaaggtattgggctgttacccaagtgagaacgtagtgcctgttgatccaacctgatgaaaaggtgccggatgatgtgaatcatccggcactggattattactggcgattgtcattcgcctgacgcaataacacgcggctttcactctgaaaacgctgtgcgtaatcgccgaaccagtgctccaccttgcggaaactgtcaataaacgcctgcttatcgccctgctccagcaactcaatcgcctcgccgaaacgcttatagtaacgtttgattaacgccagattacgctctgacgacataatgatgtcggcataaagctgcggatcctgagcaaacagtcgcccgaccatcgccagctcaaggcggtaaatcggcgaagagagcgccagaagttgctcaagctgaacattttcttctgccaggtgcagcccgtaagcaaaagtagcaaagtggcgcagtgcctgaataaacgccatattctgatcgtgctcgacggcgctaatacgatgcagccgagcgccccagacctgaatttgctccagaaaccattggtatgcttccggtttacgtccatcacaccagaccacaacttgctttgccaggctaccgctgtccggaccgaacatcgggtgtagccccagcaccggaccatcatgcgccaccagcatggcctgtaatggcccatttttcactgatgccagatcgaccagaatacaatctttcggtaaaggcggtaatttgccaataacttgctcagtaacgtggattggcacactaacaatcaccattccggcatcggcaacaatatcagccgctcgatcccagtcatgttgctccagaatccgcacctgataacccgagagggtcagcatcttctcgaacaggcgtcccatctgaccgccaccgccgacgataaccaccggacgcagtgacggacaaagtgttttaaatcctttgtcgttttcactggagtaagattcacgcatcacccgacgcaaaacatcctcaatcagatctggcggtacacccagagcttccgcctctgcacgacgcgaggccaacatagatgcctcgcgctccggaacataaataggcagtccaaagcggcttttcacctcgcccacttcagcaaccagttccagacgcttcgctaataaattcagcagcgctttatcgacttcatcaatttgatcgcgtaatgcggtcaattcagcaaccataataaacctcttaagccacgcgagccgtcagctgcccgttcagatcctgatgaatttcacgcagcaaggcatcggtcatttcccagctaatgcaggcatcggttacggatacaccgtatttcatttcactgcgcggttgctcggaagactgattgccctcgtggatattactttcgatcatcagaccaataattgagcgattgccatctttgatttgagcaaccacggattctgccaccgcaggctgacggcgataatctttattggaattaccgtggctgcaatctaccatcagagacgggcgcagtcccgcctgttccatctctttttcacattgcgcaacatccgcagggctatagttcggcgctttaccaccgcgcaggatcacatggccgtccggattcccctgagtttgtagcaacgcaacctgccctgcctggttaatgccaacaaaacggtgcggctgggcggcggcgcgcatagcgttaattgctgttgccagactgccgtcggtgccgtttttaaaaccaaccggcatggaaagcccggaggccatttcacggtgagtttgcgattccgttgtacgagcaccaattgctgaccagctaaacagatcgcccaggtattgcgggctattcggatctaacgcttccgtcgccagtggcagtcccatattcaccagctcaagcagcaatttacgcgcgatctgcagcccggcttctacatcaaaagagccatccatatggggatcgttaattaaccctttccagccgacagtggtacggggtttttcaaaatagacgcgcattaccagatagaggctatcgctgacctctgcggcaagggctttaaatcgacgagcatattccagagcagtttccggatcatgaatggaacaaggaccacatactaccagcagacgaggatcgcgcccggcgataatatctgaaatgcttttacgcgagtcagcaatctgggcttcttgttgcaggctcaatggaaaagcggccttcagttgttccggagtcattaaaacctgttcgtcggtaatatgtacgttattcagcgcgtctttttgcatgatggcgatcctgtttatgctcgtttgcgatagttgatcctcagcgaggatgacgtaacgataacacataaagtaaagttttcaatccatatttcgtacatttttatttacacaggcaatttagtcgcgctttcaacccttacctctgtatagataaatttacactccctttgaaaacaatccgctatgctttgaaaaaggagaaagaaatgatgaaaaagtttatcgcccccttgttggctttactggttagcggatgtcagattgatccttatactcacgcgccaaccttgaccagcaccgactggtatgatgtcggtatggaagatgcgatatcgggcagcgccataaaagatgacgatgcatttagcgattcacaggcggatcgcggtctataccttaaaggatatgccgaaggacaaaagaaaacttgccagaccgattttacttatgcccgaggactttccggtaaaagctttcctgccagctgcaacaatgttgaaaatgccagccaactgcatgaagtatggcaaaaaggggctgatgaaaatgccagcacaatacgattaaattaattaaaaccccacaaataaattaaacataagattttactcattgtgttttatttctcacattgatgacggtcgcatgaaaaaatgatattttaatgagcattctgaaaaaatatcgatgcatttcgagcgaagatggtggggatccctgaatgcgtttttctcaccgactgttcttacttctgattctcctgctgacgggagcaccaatactcgctcaggagccttctgacgttgcgaaaaacgtgcgtatgatggtttccggtattgtcagttacacccgctggcctgcgctatcagggccaccaaagttatgtatcttttcatcttcacgttttagtaccgccctacaagagaatgccgcgacatctttgccttatctgcctgtcatcattcacactcaacaagaggcgatgatttcaggctgcaatggtttttattttggcaacgagtcaccgacattccagatggaattaaccgaacaatatccgtcaaaggcgttattattaattgccgaacaaaataccgagtgcattattggtagcgccttttgtctgatcatccacaataatgacgtcagatttgccgtaaacctggatgccttatcgcgtagcggtgtaaaggtcaacccggatgtcttaatgctcgcacggaagaaaaatgatggataacgataattctcttaataagcgccccacgtttaaaagagcattacgcaacatcagtatgaccagcatatttatcactatgatgctgatctggttgctgctttccgtgacctcggtgctgaccctgaaacagtacgcgcaaaaaaacctggcactgacagcagcaacaatgacttacagtctggaagcagctgtcgtttttgccgatggccctgcagcaactgaaacactggcagcgctgggccagcaagggcaattttcaactgcagaagtacgtgataagcagcaaaatattctggcatcctggcattacacccgtaaggatccaggcgatactttcagtaatttcataagccactggctcttccctgcccccatcattcagccgattcgtcacaatggtgaaaccattggcgaagtacgcttaaccgctcgcgacagttcaatcagccattttatctggttttcgctcgccgtactgaccggttgtattctgctggcatcaggcatcgcaattaccctcacccgccatttgcacaatggcctggtagaagcgctgaaaaatatcaccgatgtcgtacatgatgtgcgttccaaccgcaatttttcccgacgagtttcggaagaacgtatcgctgagtttcaccgcttcgctctcgacttcaacagtctgctggatgaaatggaagagtggcagcttcgtttacaggctaaaaatgcgcagcttctacgtaccgcgctacatgacccattaaccgggctggctaaccgcgcagcgtttcgtagcggcatcaacacgttgatgaacaattccgatgcccgaaaaacgtcggcgttactatttcttgatggcgataatttcaaatacatcaatgatacctggggtcatgcgacgggcgatagagtcttgattgaaatcgcaaaacggttagctgaatttggcgggctgcgacataaagcataccgcctgggcggcgatgaattcgctatggtgctctatgatgtacagtcggaatctgaagtgcagcagatatgttcagcactgacacaaatctttaatctcccgtttgatcttcataatggccatcagaccaccatgacattaagcattggttacgcgatgaccattgagcacgcctctgcggaaaaattacaagagcttgccgatcacaatatgtatcaggccaaacaccagcgtgccgaaaagctggtgagataacaaggatatatcgatatgataaagcacctggtagcacccctggttttcacctcactaatactgactggctgccagtcccctcagggaaagtttactcctgagcaagtcgccgctatgcaatcttatggatttactgaatccgccggcgactggtcgctgggcttatcagatgccattctgttcgcaaaaaatgactacaaattgctcccggaaagccagcaacagatccaaaccatggcagctaaattggcctcgacagggctaacacatgcccgtatggatggacacaccgataactatggtgaagacagttacaacgaaggcttatcattgaaacgggcgaatgtcgtggccgatgcatgggctatgggtggacaaattccacgcagcaatctcaccacacagggtttaggaaaaaaatatcccatagccagtaacaagaccgcccagggccgcgccgagaaccgccgcgtcgcagtggtgattactaccccttaaaacaccagcaaacagataaaaaagggccagccaattggccagcccttcttaacaggatgtcgcttaagcgaaatcttagttaagacgctctttgatacgagcagccttaccagtacgctcacgcaggtagtacagtttagctttacgaacagcaccacgacgtttgacagaaatgctgtcaactaccggagagtgagtctggaagacacgctcaacgccttcgccgttggaaattttacgaacagtgaatgcagagtgcagaccgcggttacgaatagcgataaccacgccctcgaatgcctgcagacgttttttggaaccttcaacaacccatactttcacttccacggtatcacccggacggaaggaaggtacgtcctgcttcatctgctcttgttcaagttgcttaataatgttgctcataatttaatctcttatcctgggtaaactgatatctcgggggcttacgccatcccatcatgtttatgttgctgttgtgcgtgttccgttttgaactccgccagcaaccttgcttgctcttcagtcagagccaggttttccagaagttcaggtcttctaagccaggtacggcccagcgactgtttcaaacgccagcgacgtatctcggcatggttgcccgacagtaacactggcggaacttccatcccttctaacacctcaggccgcgtatagtgcgggcaatccagcaatccttcagcaaaggaatcttccgttgccgaggcttcatgtcccagtactcccggaataaaccgggaaacggagtcaatcagcgtcattgctggtaactcaccaccactgagaacgtaatcgccgattgaccattcttcgtcaatttcggtttggatcacgcgctcatctataccttcgtagcgaccgcacaccagaatcaatttttgattcgttgccagttcgctgacgcccgcttgatcaagcttgcgtccctgtggtgacagataaatcacctttgcgccttcacccgccgcggcttttgctgcatgaatggcgtcccgcaagggttgcaccatcattaacatccccggtccgccgccgtaaggacgatcgtccacggtacggtgccggtcatgcgtgaagtcgcgaggactccagctctggatgctcagcaggccatttttaactgcccggccagttaccccgtaatcggtaattgcgcggaacatttcaggaaacaggctaattatgccaatccacatagcgccgtcttttaccgtttatccggtggtttaaaaaccaggatcccaatctacttcgattgaacgagtagtgagatcgactttcttgataacctgcccatcgaggaacggtacgagacgttccttgataccaaacgcatctttcaggtttgccttaatgacgagaacgtcattagatccggtttccatcatatcgacgactttaccgagatcgtagccttcagtggttactacctggcagcccatcaggtctttccagtagtagtccccctcttcaagctgaggcagctgcgatgaatccacgacaatttcacaattcgtcagcaggttcgccgcatcacgatcgtcaacgcctttcagcttgatgatcatgtcctgattgtggtgcttccagctttccagctggacttgctgccactgacccgccttctggataaaccagggctgatagtcaaaaatgctttcggcgtcttcggtggaagaaaacactctgagccacccacgaataccgtaagacgaacccatttttcccaaaacgatgggatcaacaggtgcttgcgcggtgagttgtttgctcatcatgaccaccgtgacagattaagctgctttgtttacttctttgatcagcgcagcaacgcgatcagaaatagttgcgccctggccaacccagtgagcgatgcgatccagatccaggcgagtgccttcttctttttcgctagcgattgggttgaagaaaccaacgcgctcgatgaagcgaccgttgcgtgcattacggctgtcagcgacaacaacctggtagaacggacgctttttagcgccgtgacgtgctaaacgaatagttaccataacatcctcttgtgtgaataaaacaaccggaccccatcgaggaacggagtccggtgtcatattaaaagcccgaaaattttactcatttttgcgggaattgcaatcaacagttgctaactctgctgtaaaaggccgtcggcggtgcagccagtttggtgccggagtgcgcgcagtcaccggagcgtacacgcagtacgtgaggatgacgagcacatcccggtgccaaaatggcaaacaagccaggccgattagcgaccagggaagcctgggggcatcatacccttcatgcttctcatcatcttcgccattccgcccttcttcattttcttcatcatgcgctgcatgtcgtcgaactgtttcagaagacggttaacgtcctgcacctgcataccgcaaccggcagcaatacggcgtttacgcgaacctttgatgatttctggcttagcgcgctctttcatcgtcatcgagttgatgatggcttccatacgcaccagcactttatcgtccatctgtgacttgacgttatccgggatctgccccatgcccggcagcttgcccatcagactagccatgccgcccatatttttcatctggcgcagctgctcaagaaagtcgttgagatcgaagccgtcaccttttttcagcttgctggctaatttctctgcctgcgcgcggtcaactttgctttcgatatcttcgatcagcgacagtacgtcgcccatgccgagaatacgcgacgcgatgcggtccggatggaacggctccagcgcctcagttttctcgccaacaccgaggaacttgatcggtttgccagtgatgtgacgaatagagagcgccgcaccgccgcgggcatcgccgtccactttggtcaacactacgccggtaagcggtaacgcttcattgaatgcttttgccgtattggccgcatcctgaccggtcatggcgtcaaccacaaacagggtttcaaccgggttaatcgacgcatggacttgtttgatctcgtccatcatcgcttcgtcaacgtgcagacgaccagcggtatccaccagcagcacgtcgtagaatttcagtttggcttctttcagcgccgcgttaacgatatctaccggcttctgaccaacatcagaagggaagaaatcaacgcccacctgctctgccagcgtctcaagctgtttgattgccgccgggcgataaacgtcggcagaaaccaccagcactttcttcttgtgcttctcgcgcaggaacttaccgagtttaccaacgctggttgttttaccggcaccttgcaggcccgccatcagtacgaccgcaggcggttgcgcagccaggttcagggtctggttctcttcgcccatcgccgcaaccagttcgttacggactattttgacgaactcctgccccggcgtcaggctcttattaacttcatgaccaaccgctttctcttttacgcgattgataaactcacgcactaccggcagagctacgtccgcctccagcagcgccatgcgcacttcgcgcagcgtatcttttacgttgtcttcagtgaggcgtccacggccactgatattgcgcagcgtgcgcgacaaacgatcggttaaattatcaaacattgtctctcgcctggggtggaaacggttggccgcaatcgcgacacatcatcagtattttgccgcagtataacatgaaggcgtctttgttgttatgcaacggttggagcagcgttcacctgacgctatactgcttctctttcttattgctcaaactgtcgacatcactatgcccgtttttgctctgctcgcgcttgtcgcctactccgtcagtcttgcgctgattgttcccggtctgctgcaaaaaaacggcggctggcggcgcatggctattatttctgcggtcattgcgctggtctgccacgcaatcgctctggaagcccgcatcctgcccgacggtgatagcggacaaaacctcagcctgctgaacgttggttcattggtcagtttgatgatctgtacggtaatgaccattgtggcttctcgcaatcgtggctggctgctgctacccattgtctatgcctttgcgcttatcaacctggcgctggcaaccttcatgcccaatgaatacatcacccatctggaagctacgcctgggatgctggtgcacattggcttatcgctcttttcctatgccacgctaattatcgccgccctgtacgcgctgcaactggcgtggattgattaccaactgaagaacaagaagctggcgtttaaccaggaaatgccgccattgatgagtatcgagcgtaaaatgttccacatcacgcagattggcgtggtgctgctaacgctcacgctttgcactggcctgttctacatgcacaacttatttagcatggaaaatatcgacaaggctgtgctctctatcgtggcgtggtttgtctatattgtgctgctgtggggacattatcatgaaggatggcgtggacgccgcgtcgtctggtttaacgttgcgggcgcggtaattctgacactggcctacttcggcagccgaattgtccagcagttaatcagctaaacccagaaaaggagtttcccctggaacacatttctactactacgttgatcattattctgatcatcatggtggtcatttcagcctatttttccgggtccgaaaccggaatgatgaccctcaaccgctatcgtctgcgacatatggcgaaacagggtaatcgctcggccaaacgcgtcgaaaaattgctgcgtaagccagaccgcctgataagcctggtgttaatcggcaataacctggtcaatattcttgcctccgcgctcggcactattgttgggatgcgtttgtacggcgatgcgggcgtggcaattgcgactggtgtgctgacttttgtcgtactggtatttgctgaggtattgccgaaaaccattgccgcgctgtacccggaaaaagtcgcttatccgagtagttttctgctggctccgctgcaaattttgatgatgccgctggtctggttgctgaatgctatcacccgtatgctgatgcgcatgatgggtatcaaaaccgatatcgtggttagcggctctttgagcaaagaagagttgcgcactatcgtgcacgaatcacgctcacaaatttcccgtcgcaatcaggatatgctgctgtcggtgctcgatctggaaaaaatgaccgttgatgacatcatggtgccgcgcagtgaaattatcggtattgatatcaacgatgactggaaatcgattctgcgccaactctcccactcacctcacgggcgcatcgtgctctaccgtgattcgctggacgacgccatcagtatgctgcgagtacgtgaagcctggcggttgatgtcggagaaaaaagagttcaccaaagaaaccatgctgcgcgccgcggacgagatctattttgtgccggaaggtacgccgctcagcacgcagttggtaaagtttcagcgcaacaaaaagaaagtcggcctggtcgtcaacgagtatggagacattcaggggctggtgacggttgaagatattctggaagagattgtcggcgatttcactacgtcgatgtcgccaacacttgccgaagaggtcacgccgcaaaacgacggttcggtgattatcgatggcaccgccaacgtgcgggaaatcaacaaagcctttaactggcatctaccggaagatgatgcccgcacggttaatggcgtcattcttgaggcactggaagagatccctgtcgcaggcacccgcgtgcgtattggcgagtacgatatcgatattctcgacgtacaggacaatatgattaagcaggtaaaagtttttcctgtgaaaccgctgcgcgagagtgtggcggagtaacgaaaacggcccggcattcgcatgcagggccgtgaattattacgaaagcagaaattaagcttttgctttcgctacagtaaccatcgccgcacgaatcgtacgaccattcagcgtataacccttctgcataatgcccagtacgttacctggcgcaacgtcatcagattccaccattgcgatggcctgatgcacattcgggtccagtgggacgttagtttcggcgatcacttcaacgccaaacttacgcacaacatccagcatcgacttcagcgtcagctcaatgccttcaaccatcgcagacatatccgggttagctttatcagccacttccagcgcacgatccaggctatcaatcaccggcagcaattcgttgatgaatttctccagcgcgaatttgtgggctttttcaatatccagttcagtacgacgacgcaggttttccatttcggcttttacacgcaaaatgccgtcacgttcacgggtctgggcttcagccagctgagcttcgagattcgcaattttttcatcgcgcggatccacctgctcagcagaagcttctggctcaactgcctcaatctcttcgtgctgatccatgataatttcttccggggcttgcccctcaggcgttttctgttctttactactcatgaatttctccgcgtttttttcgcattcatctcgctaacttcgcttattatggggatcagtttcagggtttcaagggaagcactcacattgtcatcaatcttcgcaacaaggacctcggaaaaatgaataatcatttcaagtgtattggcattgtgggacacccacggcaccccactgcactgacaacacatgaaatgctctaccgctggctgtgcacaaaaggttacgaggtcatcgttgagcaacaaatcgctcacgaactgcaactgaagaatgtgaaaactggcacgctcgcggagattgggcaactagctgatctcgcggtagtcgttggtggcgacggtaatatgctgggcgcggcacgcacactcgcccgttacgatattaaagttattggaatcaaccgtggcaacctgggtttcctgactgaccttgaccccgataacgcccagcaacagttagccgatgtgctggaaggccactacatcagcgagaaacgttttttgctggaagcgcaagtctgtcagcaagattgccagaaacgcatcagcaccgcgataaatgaagtggtgcttcatccaggcaaagtggcgcatatgattgagttcgaagtgtatatcgacgagatctttgcgttttctcagcgatctgatggactaattatttcgacgccaacaggctccaccgcctattccctctctgcaggcggtcctattctgaccccctctctggatgcgattaccctggtgcccatgttcccgcatacgttgtcagcacgaccactggtcataaacagcagcagcacgatccgtctgcgtttttcgcatcgccgtaacgacctggaaatcagttgcgacagccagatagcactgccgattcaggaaggtgaagatgtcctgattcgtcgctgtgattaccatctgaatctgattcatccgaaagattacagttatttcaacacattaagcaccaagctcggctggtcaaaaaaattattctaattttacgccagcctctttactgtatataaaaccagtttatactgtacacaataacagtaatggtttttcatacaggaaaacgactatgttggcacaactgaccatcagcaactttgctatcgttcgtgagcttgagattgattttcatagcggcatgaccgtaataactggcgagaccggcgcgggtaaatctattgcaatagatgccctcggtctttgtctcggtggtcgcgctgaagccgacatggtgcgtaccggcgctgctcgcgctgacctgtgcgcccgtttttctctgaaagatacgccagcggctctgcgctggctggaagaaaaccagcttgaagacgggcatgaatgtttgcttcgtcgcgtgatcagcagcgatggtcgctcccgtggtttcatcaacggtacagctgttcctctgtcacaactgcgcgaactgggtcagttgctgattcagatccatggtcagcacgctcatcaattactcaccaaacctgagcaccaaaaattcctgcttgatggctatgccaatgaaacctctctactgcaggaaatgaccgcacgttatcagttgtggcatcaaagctgccgtgacctcgcgcatcatcaacagttaagtcaggaacgcgccgcccgtgcggaactgctgcaataccaattaaaagaacttaacgaatttaatccgcagcccggagagtttgaacaaatcgacgaagagtacaaacgtctggcgaacagcggtcaattgctgaccaccagccagaatgcattggcattaatggccgacggtgaagacgcaaacctgcaaagtcagctttacacggctaaacaactggtgagcgaattgattggcatggacagcaaactgtccggcgtacttgatatgctggaagaagctaccatccagattgctgaagccagcgatgaactgcgccactactgcgatcgtctggatctcgatcccaaccgactatttgaacttgaacagcgcatctcaaaacagatttcgctggcacgtaaacatcacgtcagccctgaggcattgccacagtattaccagtcgctactggaagaacagcagcaactggacgatcaggccgactcacaagaaacgcttgcgctggcggtaacgaaacatcatcagcaggcactggaaatcgcgcgcgcattacaccaacaacgccagcaatatgcagaagaacttgcacagctgatcaccgacagtatgcatgcgctctcaatgccgcatgggcagtttacgatcgatgttaaatttgacgagcatcacctgggcgctgacggtgccgatcgtattgagtttcgggtaaccaccaacccaggtcagccaatgcagcctattgccaaagtcgcatccggtggtgaattgtcccgcatcgcactggcaatccaggtcatcacggcgcgtaaaatggaaaccccggcactgatttttgatgaagtggatgtagggattagcggtccaacagcggcagttgtcggcaaactgctgcgtcaactcggcgaatcaactcaggtgatgtgtgttacccacctgccacaagtcgcgggatgtggtcatcaacactattttgtcagcaaagaaaccgatggtgcgatgacagaaacgcatatgcaatccctgaataaaaaagcgcggttacaagagctggcgcgcctgcttggtggcagtgaagtcacacgtaatacactggcgaatgcgaaagaactgcttgcagcgtaaacttttttcctgcttcacggtcagagtaaacagcaaaacgccgtaagaccggaaagcaaaaggttttaaagtgatgaaaggtctattatcatcggcatattacagatgagccacgtactgctcgggcccgaaaaggaatcaaatcactatgcgctgtaaaacgctgactgctgcagcagcagtactattgatgttgaccgcaggctgttccactctggagcgagtggtttaccgtcctgacatcaaccaggggaactatctgaccgctaacgacgtatccaaaatacgtgttggcatgacgcaacaacaagttgcgtacgcattgggtacaccgctgatgtccgatccatttggtacgaatacctggttctatgtcttccgccagcaaccaggtcatgaaggtgtaactcagcaaacgctgacgctgacctttaacagtagcggtgtgttgaccaatattgataacaaacctgcgctgagtggtaactaataataaagctgctctcaaagacgttaaaaaaggtgctcaatgagcaccttttttctgtctgttatttattcgctgatttttctgctcgttgcctgcgaagctctttcggatcggcaatgagagggcgataaatctccacccgatcgccatcatgcacactatcgcttagttttgccggacggctgtaaatgccgactttgtttttagttaaatcgatatcggtacgcaattccagcaagccactggcgcgaatagcttcttcaaccgtcgcgccctcctgcagcgtcactcgctgcaggtactgcttctcaggtagcgcataagccacctcaacggcaattttacctggcactgtaaacctctttcgcacgaaccgtaaaagcctggaccatattagccgccagctctttaaacacgcgaccaaaggcgagttcaatcaacttattggtaaactcaaagtcgagatgaaactcgatacgacacgcctcctggctcagcggcgtaaacttccatccaccaatcaatttcttgaacggcccatccaccagattcataagaatactttggttactggtcaactggttgcgggtagtaaacgttttgctgatcccagccttagagacatctaccgccgcagtcatctgcccaggagtggactccagaatccgacttccggtacaacccggcaaaaactgaggataagactgaacgtcattcactaactgatacatttgctccgcgctgtagggtaccagtgcggtccggctaatctgaggcataacaatttccatcaacaaaaatccaacaaataatatcatttatcctgctgtaaaaaaaacgctatcccggcgctgggtaacatcgggttcatgctaagatagagccttgtcccccgcaggattgatatggggtgttttcgatttcagattaccgatgattcacgacgcttatgacgaagaaaaaagcacataaacctggttcagcgaccatcgcgcttaacaagcgcgcccgtcacgaatactttatcgaagaagagttcgaagcgggacttgccctgcaaggctgggaagttaaatccctgcgcgcaggaaaagccaatatcagcgacagctacgtccttctgcgtgacggagaggcatttctgtttggcgctaacatcacgccaatggccgtggcctccacgcatgtggtgtgcgatcctacccgtacccgcaagttacttctcaaccagcgcgaactggactcattgtacggtcgcgtcaatcgagaaggctataccgtagtggcgctctccctgtactggaaaaatgcctggtgcaaagtgaaaatcggcgtcgccaaaggtaagaaacagcacgataaacgttcagatatcaaagagcgcgaatggcaggtggataaagcacgtatcatgaaaaacgcccaccgttaaacctgcactccaattattgaccagttcctcaccgcgcctccctctccggcggcgcgaatgaacatcttattggctatcacatccgacacaaatgttgccatcccattgcttaatcgaataaaaatcaggctacatgggtgctaaatctttaacgataacgccattgaggctggtcatggcgctcataaatctggtatacttacctttacacattggggctgattctggattcgacgggatttgcgaaacccaaggtgcatgccgaggggcggttggcctcgtaaaaagccgcaaaaaatagtcgcaaacgacgaaaactacgctttagcagcttaataacctgcttagagccctctctccctagcctccgctcttaggacggggatcaagagaggtcaaacccaaaagagatcgcgtggaagccctgcctggggttgaagcgttaaaacttaatcaggctagtttgttagtggcgtgtccgtccgcagctggcaagcgaatgtaaagactgactaagcatgtagtaccgaggatgtaggaatttcggacgcgggttcaactcccgccagctccaccaaataaatcaaggggttacgtgaaagcgtagcccctttttctttggtagtggcggcaaaatggcgacagacttttgcgtccatcttgcctgtcgccatcttgaaatcatgcaaagaggtttcacatggaagaacttcactttgtttacatcaatgcaaatggtcgtatcggtgttcactctatacagagcatcagttatagcgaaaatcatatacagggcatttgtaagaacaccgatcgaataaaaaccttccgaaaagaccgcattcttaaacagtacgattcaccagaacaagccattcaggaatgcgcgtcattcctccccgaaaactactcacatctcactaagcagtctggtccgaaaaaaaatacattcgatgtgtgtttcaccggatttaagaaagcagataaagaaagattggttgataaggcgaatgaacaaggattaacggtaagaacctctgtaactcaaagccttcagatgctctgttgcggttacaatgcaggcccatcaaaagtatcggcagccaggatgaaaggcacaatcatcatagatgagcctggctttatacattttcttgaaacgggtgagatcccagatgaataaaaacctgccgtagcaggttctctttctcaaaaattcatatgcccctgaccaccaggcaatggatgtggaggagcagtagcaatcagtgcgggtgtcacaataaaccggaccactgtttcatgggtaacaaaagtgctcccgcagttaatattttggcactggcagtaacgctctttggtgctttcagttacttgaaaactgctccttgtgtgtgccgcatgaccacactttggacaattcatcatatccagatccctacctttgctatcagaatcattgtaatgatacacaaaatatcaatattgagaacactttattccatttcaagatcatcaatcttcacttcgagttcaatactggtcgtaaaaccgttatccgggctgacagtatgcgtcagggtggtaatagtccattccgcatcatctatcggctgtttaaagccactgactttcactggcatttccgtgtagagatctgcccgaccttctgccagttgtagcgagaatgacgcaacaccgcgttgcaggcgttcccactgcattttcgctgcccgttcggcgttgccccggttggcataggtgcgattaagtaccagcacgttttcatccgtacccaccaggtaatcgccctgcttcgcttccggctctttcttctgcttcttagttctgcgcttacgcttcaccgtggtgctttctttcttcgcaggttcgcgggtatgcaaccagctggcaattacacccgtgtaggctccgcgatctgccagggtaaagcggtgactgtcgccgtccttacgtgtgatagtgataaccggtagtggtttaccgctggcgcttttaccctgtccctgccggatgaataacagattgccatttttcaccgacgcaatagcaccgtactggcgcgccagccgcatcagaaaactgccgtcactctcattggtctggtctatatgttccacgggtttatctgacaggtctttacccaatgccatcttcagtttgtgccgcacagctatttccttcaccacttccccgacggtggtcttgtgccacgacttttcacggcgggtattcagcgtttcacgaaaatcagcacttcgcgcccggatagtcaggcggtccggtgcgccagtgtgttcaatctcgtccaccgtgaatgcccctttcgggaaaagcggctgccccttccagcccagcgccagcgtaataaccgcaccacggcgcggcagcacgatttttccgtcggcgtcgtccagctccagatcaagctggtccgcttcaaagccccgattgtccgtcagcgtcaaactcatcaggcggttatccagcacagtggtgatatccctgccctcaatactgatgctgaatgcgggagttttgttgcctttgttaagcagttcagagctgaaattcatgacagcagccctcccaccgttttactgatatcgcttaaggcagacgttgctgtgtcctgcagattattcagttgcgcactgagatcaccgaatatatcggacagggattcatccacccgtttgagcgacagggtgaactcaatccggcgcggcataccgtcgcggaaaaactccgttttagtctgattcagtccctcaatcacatacatgccataaatcgtgccactgccttcaatcaggggccatgctttcccctgttctgccatctgctccagtgccagcaacgacagcctgccacctgttatctccggcataagaacaccggaaagcgtcagcatgtcgttgtccggtcccagaaactgcgtggacggacgtcggtttacccggctgtttgccgcatgtcgccagctgcgttgatactgcagctcctgatacggcacggtgcgcagcataaacacgtacaatcccagcaccatcatcatgcgtcgtatcccccctgatcgctgtagttactcctggcttttgccttcagcctgcgttcacgttcatcaagctggcgggccacctcccgcgcaatatcctgcgcactttgtcctggctgtgtctggatgatgatctgcgtcggtgcttcaatccggtaaatgggcggcacagtagctgcacgactcaccatcgcttcaccgccttttgcgggaagcgccaaaggatgcaacggtggaagctctgctggcgcggcagcaacacccatcattccggcgacaacggcagccagtgcagctgtatttctccggctggtcacgtttgccgggccgttaacaatttccggcccgttttcaccgacgatgccaaactgcccgcgcgggatatagccgccgctgtcatacatccccgcaaagccatatccccatgacggaaaatcacccgatggcatcatcactttaccgtctgcattcaccgtcgcaggttgctgacgcgtcacgctttccggcagtttcgcctttgcagcctctttactgacaatgccgagtttctccagcaaccaggaaacgccggatttcagggagtccagcggatgcatgaccatattcagcccttctgccagtgcctccccgaatcgtcgccccattgccgctgcgctctgcagttcggcagaggtcgacttaacgggcgtcagcagatcagtaaaccagccccacagcgcctgcactttgtcgccaatccactggaacacgggcttaagcggttcgaacgctgcactgatgggacctgccgccgctttgaatccttccaccacgccaccgagaaatgcggtgatgggttgccagtatttccagacaaccagcgccacgcccgccagtgcagtaaccacaagacctatcggactgagcagagcacctaacagaccagataccgcacctgcagcaacacgcccgatctctgcggttgcacccatgacgtaatgcggcagtttctcttttgccacctcattaatcggtacacatggcagacaatgaatctgtgccagaaaaccatctaccagtgttgagtcttctgtcagatcagtaagcagccaaatttctggtgcagtaagctgatgcggttgttctgggttgagtttgtttcgcagtgtctgaacattcatttctgcacgttctgccagcttcgccatattgtgacgtaatgcaaaagctctacaggcttcatcaaaatgcgggtgtttggaaatcttataatcaaacatgctccccccttagaaagttctcataattgaacttacttaccaacaatgacgcggaagttggaatgaccgagggattcacggacctgatcggttttgtacattaaataacgcaggcttacgcggcctttgtttttttccttcttgaccatgtatttagcaagctgaccatggtgaattttttgatacacagagccgcgggagataccttcccattcagcgaactcagcaggcgttgccatctcttttggtacacgaattgaaatatcagtactcatagtgcagtatctcttactttgtgtgcgtgttagttcgttttagcccgtctcttaaactctcacatcaagagacacgaagacattacgatcttgattcaagattgtcaaatggagattaccaatgttaaacatcagaatgggttccgatacgggaggtaaagcagctattgagaggctgcttgcggcttatggatttacaactaagcaggcattaagcgagcacctgaatgtctcaaaaagcactatggcgaacagagtgttacgtgacagttttcctgctgactggataattcagtgcgcactagaaaccggtgtttcgttgctttggttagctacaggacagggaagcatgaaaggaggaagtgagcctgaaaaaagttctcacaatgagaacaaacaagcaattaaaccgttatccaaactcataactccatctattcctaaaggaaccttggagaatggacaactcagtattgatgaagagattttcttagaccacagcatattacctgcagattatgaagaatcgatgttcttagaaacccctactgattgttatctcatcgataaatcagttaaacaagtcagcaatggattctggcttatcaatattgatggaatgattattattgcaaaaatcatgcggattcccggcaataagattgtagtaaatcaagatgaagcgtctttcgagtgctctgctgatgatgtggaagttattgggcgtgcagtcaaagtaataaagagtatctaaacatgactgtcagaaaacagccaaacggtaaatggttgtgcgagtgctatcccaatggacgcaatggcaagcgcgtgcgtaagcaatttgctacgaaaggcgaagccattgcttttgaaagcttcacaatggaagaggtaaataagaaaccttggctaggagaaaaagaagatcggcgacaactgtcagaagtgattgagcagtggtattccctgtatggtcagacactcgctgacccaaagcgtttgatggcaaaattaaaaattatttgtaccggtctcggcaatcctattgcctcggaactgacagcaggtgatttcacaaaatatcgggaagccagattaaagggggaggtcaaaaatgaagacggtgttttcatgtcccccgtaaaacctcgcacggttaatcttgagcagcgtaacctgtcatctgtattcggcacattgaaaaaactaggacactggtcagcaccaaacccattggcagggcttccaacatttaaaattgctgaaggtgaattggcattcctatctcaggaggaaattaaacgcctacttgacgcctgcgcaaactctcaaaatccaagtctgttgatgatcgcaaaggtatgcttggctaccggcgcgcgctggagtgaagcggaaaacttacagggccaccaattatcaaaataccgtattacctatacaaagacgaaaggaaagaaaaataggacagtaccgatatctcaggctctctatgacgaactccccaaaaacagagggaagttattcacgccatgcagaaaggcttttgaacgagcggtcaaacgggctggtattgaactgcctgaaggtcagtgtacccatgttctgcgccatacattcgccagtcattttatgatgaacggtggaaacatactcgttttgaaagatattcttgggcattcagatattaaaatgactatgatttatgcacatttttcccctgatcatttagaagatgcagtaactaaaaatccactttattcgctattaaaggactaaataatgactctccatcaaactttatctaaagaattaagagatttatttgttagtattttaagacattctctttttcgcccccccatcaaaataaatggggatatagtctctgatttttcaaacagatgcgagcagttcaaagagtgcctaaatgaatacatttgtgataacaataatgctgcttccgaaagagttaagccaagaattaaaactattgaaaaaatacaacatggattaactaattctcttaaagcatttttatctggcgacattaaaggagcctacgatatttttgatgaagttttatcataccctactgtctatagacatctaagaagaatatccattccactaaaagaaatatgtaataagcacaagcctttattcagggtaagaaagtcagatagaccagtcgtaacaagaaaggaaatatttcatatcccattcactcatcgacatcttgtcaatgctcaacgctactccgttgcaggtttgccatgcctttacttaggttcatctctctatatatgctggcaggaaatggataaacctgactttgataaattatacctatcatcatttatatcttgggatgaggaatcttatattttaaatttagctgcagattttctttacagtagaaccgctaaaggattttacggtgatattagtaatagagataacctcattaaaatatcatatttaactttatggcctctgataattgcatgtaattatttaaagcagaatgaaaactcttcatttaatcaagaatatatcatcccaaatttgttaatgcagtggataagtcgacttgaagatagagctattgtcggcatagcatatcgctcaacaaaaataaaaagaacagcaaactcacacttagcaactaatgtcgtcttgcctccaaaagtaaactatgaagatacaatcacaaaaccttattgtcagaaactattgtcaatgtttgagtttactcaacctgtatcatggcaggttttgaaaacattagactataaaattgataatgaaataaatcaagagcaagaaaaagcaattcatttactaaaacagaaagaaagattaagtggcatacaagatttaaatgaagatcttataaacctttatcctttaacagacttctacaagctagaacagtgcatggatcgcctgctgcagtatgatgtacttgagataaaatctggcggcactttggcggcagagcgttaaaaataggtaaaacaagcaaacacacaataacactaacatactaattttaaagataaatacatgtttttattatagtaaaaatggtatgtaggaatttcggacgcgggttcaactcccgccagcccaccaatcatgattggacggtgtaaggacaacaccaacaaaaacaggaagttagaagtctcagcaaaacaccgaccagacggtgaggagacataaaaggatacgcaaaggagccgcggctcctggtaacatgaaagcccacagatgtgggctttttcgttgatggtcagaacgaccagttcacaccagctaccgcgttccacggggattccacaccggcactatggctataccccaccccaagatgcccgcttaacgtactgctgaatgaggctttaatacctgcctggtatattccacgtctgcccgacaaataattgacgaaattaccgtcactattcactttcacccggttatcatcgacaaattctttgcgcacagccgccttcagccacggctcaacttccataccgttccccagacgcatgttgtaactcagcgttgcgcccagttcacgatatatactgcgggtatcgactgatttcgatttcatgccattggataaatgatattcggggttatcagcggtgaaccccgttaacgatgcatacggcgtcaggttccagttaccatcggtaaatcgcatcccggtttcaatgtgaccgcccagcccgttgctgtggtaactgccattggcggctccaccgctgctcattttacctgctacgttacttttaaaacggttcagcttcacgacaccgtccagatagaaaccactttcatgttcccaactggcatagccgcccagagaataactgcccacactgccatgtcctccgcgatcaaaaccgatatgtgaatgggaatagcccataaaagcgcctagcgtggtaattccttcaggaatatcattacggctgtcgatccccactgtcattccggtcagcgtctgctcaaacccggcacccgcatcggtggtgacattattacgggtgttatacgtcgccccccagacattattgttgtgtggactcgctttcattatgttcaaccgctcgcgaatactgtttagctcagcatcaaataccaacggtaatgttgctgccatattgagtacggctgccgtagaaggcgtaatgcgtttctccggaacgggtgtcggcgttggatcgggagtagggtctggttttggatttgggtctggctttggatcgggttttgggtctggctttggatttgggatggggtccgggttgggtttgacatcattggtcaggttccagttgctgttgccgtcacttttcaggacatactcataggtcccaagatcaacgaaaccgccggtattgcccagcgtaaacgaagcatcccctccccctgttttcaccagcgtcatcgcgtcgtcagactgtgggctgacgccggtatcctgaacaaagattttaaaattaccagtggcgttgttgttgacgaccagttgatcgccccgggagcctgcaacgttggtatgcaggtagaaattaccgctaccggaaagttcattggttgtcagcgtattgtagataccgttagttgtggcaggcgctgctgtttgtgctgacaaataaacatcaccgtcgttgagtagcaaactgtttactctatattcgcagttgctggtacctgcacaggaattattgctgttaagccagacactgccccggctggcagccgtcaggtcggcaagcgtggtatcgacgccatttcccagagtcaatgtcgcgctatcggtaatccggaccgccccttcgagtttaactggcgtaacattatcccgtggcgtcattaacgacaggcttcctgtcgcgccactgaccgatgcatccgccagcgtacctgcgtagacgattgccgtaccgccagcgacctggagatcttctgcccgggccagagcctgaaactcatcttttgaccgcccaagggtatattgcccgccagagttaacctttgtggcggagtcctgacccaggttttgcattgccccacccttgccaaccgtggagtcgcgagcttcggtacctgctaataccaataaattaccgccattttccagcaacatattggtcgctaaattgccggaaatggaaaaagtaccgtactggtgagtaccgctgatttcaataccgttagccgtgctcgtctggagagcggcaccgctgttctggacgatatctgtcgctttgccattatcgttgactgtcagcgtaccgccttcattgatctttgtttttattgcctctccgttagctgaaactgtttgtattccgccgtcgttaattgttgtctcattcgccacaccctcgacaatttgttcaccgccggtgagcgtcgtgcctgtcgcagtggcttttgttttgacgatctcccgtccgcccatattgacctgtgttttgtcagaagaggtgtctgactccacggttaacacgccgccatttgccagcaggatattgttcgccgcaccctgctcgatgctgaacgcgacgccatccgcgcgtgttcctgtgacccgcgtcgccctggtggttgcaaccaaagcgccctggctactctgctgtatccccgttgcgctgcctttctcccgcacatcgagtgtgccgccgtcattaagcaccgagttttcagccagaccgccctcattaactacctgtgaacccccattaataatggaaccttccgctgtcccgtttgccataatttgttgtaggccagagacgatatcggtattgattgccttaccataattctgaacggtttgcgtgccaccattgatgtgtgttttctctgttgacccaccatcaacaatttgttcaccactttcgatatttgcttcagtggctaaaccatataccgtttgcttgccacctttgatatttgctttatcagaagtggcactggcatatattgtttgggtgccagcactattgagtacagtgccaacatcttttccataaacatccattttgccgttggcattaataatcgtgtcaactgcgcgggaaccagtgacgactgttaatgagccagcgttttccagcactacatttttagcttctgaattcctgatgtagaaagcatcaccataactgttggttccttcgataagtgttccggaggtcgtggaagcaattaatgcgccgccggattgttgctcaacatgcttagcctcaccaccgtcctgaacctccagaacgccgccattattaagtctggtgctatctgttttagcctccttctggacaatcagcttaccgccagtatcaatggtagtatttttcgccgaggttttagccactaccgtcagttcgccggtattttccagcacaacataattagcctcccctccggtaatagtgaagtgagagagcttgttgtatccttcgatatcagtccctgcacccgtgttggcaactaaagcactgcccgtctcctggttaaccccatgtgcaataccgccggtatagacaatcagcgagcctccggcgctaatattgctgccaattgccgtaccatctttctcaacaacctgccggctcccggaggatataattgttgtgtcagctttcccgccgcttttgatattttgcgttccgctgttgatattggtgcctgtggctatgccataattattaatattctgtgtgccaccattaattatggtatttgtcgcgtttcctgcaacatccataaccccgccattatctattcgggtcgcatcagctttagcattggttaaaactgacattgttcctttatctttaataatcgtcttgtttgccgaaccatatgcgtttatgtctaaatgaccaccgttttccagcaacacattgtctgccacgtgattgtggatggagaatgcaccttcactattcgtaccgctcaccgtcgtaccgttagtgttagtttttaaaattgcaccatcgtgctgggtaacatttgttgccgtaccaccactaacatcaagcacgccaccagaataaacttcaataacatccgaggtgctggtgttatcaacaatttgcgtgccaccagaatagatatgcgtattttttgccgttgacttactattcagagactgagttccgccttcaatcgtcgtgtccagcgcacggctctcatatactctttgctcaccgccatttttaatggttgttgtttctactgtgctctgttcaacatactgtcgaccaccatttatggttgtgttcgttgccagacttccttgtactacgtcctgagagccagacttatttatcgttgtaccatcagcatgcccttgaacttttactatctggctaccaccatcaatgagtattccattcgcactccctccctctacgcgtgaagcaccgcccttaattgtcgttccattgctgataccccctttataaacgtcctgattgccactctcgattgtcgtacctgtggaaatacccccgtcatgaattgactgtctgccaccgttaatggttgtattattagcctgccccacaaaattgttatgacttcctatatcttgatatccaccagattcaataagacttccattagataccccgccatgaacattctgctggccatggttgataatatgagtgttatttgttgtacctcgttcatccactttttggttgccatctacagtctcatcgtttaccacaccaataacattagtagtgaaggcagccatcccgggcggggcatatatcaaggcagatatcaataaggaaagtactgagcggcgacaataatagggactggtcctgttcataaatttcatcctctgaaaagtgaatactgagtagcgtttaagcgaccttagctttgctgcaacatcagcccacaggcaccagaccaggggattcatcctgaagagacagcgcaagtgtattgtgttcaccgctcatcaaagacatcatgatgaaatgatgatattccgcataagaatgaggcattttttaaacgcagtgcgctgaagtgtggttggataaaaaagtcaatccattcaggaaatacgggcgtattcttttctttcgacaatgaggccgttggcaaaataaaatgatttacataatcgtttctgatgaatatcttctgctcacataaaaatcacacaataactttgagatcgcagattgttttacttttacagcattcgtccccccattgttgggcaaatatagattgggccagagcacgaaagttaataccacgttcgcacagctcctccaacagcacgacaagatgccacatactgcgccccagtcggttcagtttacagactagcagtgcgttccctgccgatgatgtcctgaccagttttttcagtccggacctcctgccacggttttacgttgaagtggtaaccctgagcacgcagttcttcagtcaggcgtggtgcaccgtaacgctgttattgctgggtaagatcaaaaaactttcaggcagctaaggaaagttgaaccagacattagatgaaatatttcaaccaattacagcaccaattcagtcactgccagcccaccaaataaatcaaggggttacatgaaaacgtagcccctttttctttggtagtgacactaaaatggatgtagtgtgaagaataatcccgtttactcaatcaataatacatattgtttcaatctacgttattatctctttgtaaaaattgccatttattaatcattgaaaactgcttttagaacttgatacaacgggactagtcacaacaggactattctcaacgggatcatcctcagaggaactatcatcaaagtcatcatccataaataaaatatcatcgaatggtgccacgcccgtgatgagttttattttattattacgatcagtcaatactccacttaaaccgttttcgctcacaggttttaatgatttttcattactcttgttgtaagcaggcgcattaaaaatacacggagtatcaacatcaaacaatgacgttccccagttcacatattgaatatcatagttactgaagttctgtccagaaaagaagcaccccttaaaatccaatccacgtaaattatataaaccaccctcttctttttggagagtaatgttaattttggctatctcccggacatcatcgccatttttgtatttgaataccgtttcaagatgttctccagacagcttgacttcaggaaataatttgaaatcaaagcctatattattatgtgtcaacgtagatgaacaaaaaatggaaaaagcttgcagtgctgaattatagctatcgattttatcttgaggctgagctcttggtaaaaacttatagcaacactcataaaaattaaacagaagctctgaagaccttgtatttttatcaaataatacccccttgaactcattcacaaacgcatcttttttttcttgaatatctatggggtgttcctttgactctgacaaagatgaaatctcatctattttgttttcatatgaattacgtgattccatacagacatttggcggcgtttctaaaataacactacgcgtactacttggcttaagtaaaccaacatgaaaatcactttttcttatattatcgaaaaggttctattcatttcttttagcgcattcaaaaaactgatcggcattatttttattcgataattttttagtttcagaaaacacattttcattgttttccagctttagtttaatgagaagattttcccagacctgcttgcttaaacatattacgtcaggctcaccagaactaactaactcgtgattattattaaagtgtacgttgaatacctttaagttattttcaccaacttcatatttaatacgttttaattgttctccagctcccataatgacaaaggcgttgccttcttgatatatacattcagacatcattttttgtaaagtttcaagagcaccgcgatacgtctctgatgcagcttccttacaaattaattttaaaatactatgagctagtagctccatgtgtttagaagatttattttcattataacttccactacccaaaactgcgctagcgttaaatccgttgcttttactaactaacattgtctattcctcaattaatgtctacatggctatttttaatgttattactgtttgtcactataaaaaacgctcatttgagacaattactgacattaactgcttcacttgctacgcatggaacttttaattaaattagcacaggaatgttaaatttaataaacaaaaggttatttcgctgtatgataaaaaaaaccgttataatttattagtgaaaatcgtttttcaagtgttagaaatttatatctcaatagcgttggttaatgagcatagccacgctcctgtaacgctcacaaaactcatctgcctgcggcgggtgttctggtcagtagtagatgtttaaggcgtggcagagacatttcatccttactctacggcattgttctacatacattggttgtggtactcacttatcatcagtgagcgaacagagaatagttcagtgatttgagtaattaacctgattaaatgaaggggtataataaatgataatactctggctttatcgttaattacttaattccacatgtaagcaatttgcccgcttggcatagcaggcattttttccaggtacttttgaatgagtactgatggataaatacattgcagtggcgtgccacgtaccaaaacaccagccctcattcgaaaccacccaccgcacttcttccttgaaatggcgttagtcatgaaatatagaccgccatcgagtaccccttgtacccttaactcttcctgatacgtaaataatgatttggtggcccttgctggacttgaaccagcgaccaagcgattatgagtcgcctgctctaaccactgagctaaagggccttgagtgtgcaataacaatacttataaaccacgcaataaacatgatgatcatatgatgtaaataacagatttttatgcgttcccattcaccttgggtcgtgattacacgcgacataaaacccgacaccgcctccattcgcaaagtcgatactcgcagtcaacaagcaaatgttaataattagcactatctatagttatcatcgattcaatgatactttgtaatgattttgtatctaataatataactttattacattagctgaagagttttcgcatcattatgatatctgttacttttcactccataaaaataaacttcgtatagcaatatattctttcatagatcttattctgctaatcattagtttcgtatgagcgatttttgacagttgcctctccagaccacatcgataattaataaaacagatttaagcattatccttttccatataaatattggataaaagtaggacatctgtttgcaattactttcacaacaattaaacatttttatgtttccgtatacatcatattactctaacattagaggaactttattatgttttctataaaaccaggacccagaaatttacctatcgacaaccccacattgttatcatggaacattactgacggggatctaaattccaaattaaatacattagaatatctaaactgtataacaaatattattaattcttgtggagtttaccctcaaggattaaaagacagagaaattatatcaacttttcacgcagaaaaagttattaatgatctgttaaaaaacgattataaaatttccctttctccagatacaacttaccgagagttgaataaagcagcacagcgtagcattacagcgccagacaggataggagaaagaaaaacataggtttatcaacgagatacaatgattgaaagaggtgataacagcggtgtttatcagtatggtcgtgctgaacatttcacccacattatatctgacaaaccttccccaaaagataaatatgttgcatatgctattaacattcctgactatgagctggcagccgatgtatataatattaacgtgacgtcaccttccggacagcaagaaacatttaaaatattaatcaatctagaacatctacggcaaacacttgagcgtaaatctcttactgctgttcagaaatcacaatgtgaaatcatcacccccaaaaaacctggcgaagcgattcttcatgcttttaatgccacctaccagcagatcagagaaaatatgtctgaatttgcacgttgccattatgggtatatacaaatccctccagtgacaactttccgcgccgacggaccagaaactcccgaagaagaaaagggttactggtttcatgcttatcaacccgaagatctttgtaccatccataatccaatgggagatttgcaggattttattgcattggttaaagatgctaaaaaatttggtatcgatatcattcctgattatacctttaactttatgggaattgggggtagtggtaaaaatgacctggattatccctctgctgatatacgagcgaagatcagtaaagatatagaaggtggtatccctggctattagcaaggtcaggttttgattccattcattaaagatccagtaacaaaagaacgtaaacaaatccatccagaagatatacatctcactgcaaaagacttcgaagcaagtaaagataacatctctaaggatgaatgggaaaacctccatgcattaaaagaaaagcgtttaaatggaatgcctaaaacaacacccaaaagtgaccaggttattatgttgcaaaatcaatacgttcgtgaaatgcgaaaatatggcgtacgaggtttacgttatgatgcggcaaaacactcaaaacatgaacaaatagaaagatcaataaccccaccgcttaaaaattataatgagcggttacacaatactaacttatttaacccaaaatatcataaaaaagccgttatgaattacatggaatatctggtaacttgtcagttggatgaacaacaaatgtcatcactgctttatgaaagagatgatttaagcgccattgatttttcattgctcatgaaaacgataaaagccttttcatttggtggagatcttcaaacccttgcatcaaaaccgggttccacaatctcaagtatcccatcagaaagacggatattgattaacattaaccacgattttcctaacaatggtaatcttttcaatgactttctatttaaccatcaacaagatgaacaattagcaatggcatatatagccgctctgccgttcagcaggcctttagtttactgggatggccaagtattaaaatcaacgactgaaattaaaaattatgatgggtccacgcgtgtcggcggtgaggcgtagcttaataaaggttgctctacctatcagcagctctacaatgaattccacgcattatatatagataaagcaggaatatggagcgcatttgagggtgtatctgcaactaaaaacgttctggcctttagtcgtggggattctgtgaacattaatcactctcctcatgatggactagttataataaataaaggaaacgaagaagttgaaggtacctggcctaacaaattgcaacctggaatatacaaaaacatggggagtaatagcgttaacattattattaataatacccgaaaaattatcccccctggtaaagtatttacgcttagaggcggaactctaaatatcaatattcctgggcgtagcgctcttcttttagggaaaacaggagaaccgccgaactatctctatttataatttaatgttatatctgccccgataaaacggggcagataatatgtttagtttactaacggtcattttgcagtgaagccatttactgttttttatcgaccagataatctgttctctaatgttaactccccctaacctgttgctttagttattcatttcctgtctcactttgccttaataccctacgttaaatgttactaatttgttgcttttgatcacaataagaaaacaatatgtcgcttttgtgcgcatttttcagaaatgtagatatttttagattatggctacgaaatgagcatcgccatgtcaccctacatctcataagaggatcgcttctgatgaatgcactgaccgccgtacaaaataacgctgtcgattcaggccaggactatagcggattcaccctcaccccgtcggcgcaatccccgcgtctgctggaactcaccttcaccgaacagacgaccaaacagtttcttgagcaggttgccgagtggcccgtgcaggcgctggagtacaaatcgtttctgcgttttcgggtagccaaaattcttgacgatctatgtgcgaaccagctgcaaccattgctgttgaagacgttgctaaaccgcgctgaaggtgcgttgttgatcaatgcggtgggtgtcgatgatgtgaagcaagcggatgagatggtgaagctggcgacggcggtggcgcatctgattggccgttccaatttcgatgcgatgagcggtcagtattacgcgcgttttgtagtgaaaaatgtcgataactcagacagctatctgcgccagccgcaccgcgtgatggagctacacaacgacggcacgtatgtcgaagagataaccgattacgtgctgatgatgaaaatcgacgagcaaaacatgcagggcggaaattcgctgctgctgcatctcgatgactgggaacatctcgacaactatttccgccacccgctggcgcgtcgcccgatgcgctttgccgcgccgccgagtaaaaacgtcagcaaagatgtttttcatccggtgttcgacgtcgatcaacagggtcgcccggtgatgcgctatatcgaccagttcgtccagccgaaagacttcgaagaaggcgtgtggttgagcgagctttccgacgccattgaaaccagcaaaggcattctttctgtgcccgttcccgttggcaaattcctgttgattaacaacctgttctggctgcacggtcgcgaccgctttactccgcacccggatctgcgccgtgaactgatgcgccagcgtggctatttcgcttacgcctctaaccactaccagacgcatcagtaagcgcaaaggaattgagcggatgtatgattttgtgattattggcggcggcatcatcggcatgtcgaccgccatgcaactgattgatgtctatccggacgcccgcattgcgttgctggaaaaagagtccggcccggcctgtcaccagacgggccacaacagcggcgtgatccatgccggggtctattacacgcccggcagcctgaaggcgcagttttgcctggcgggaaaccgcgccaccaaagccttttgcgatcaaaacggcattcgctacgacaactgcggcaagatgctggttgccacgtccgctctcgaaatggaacggatgcgcgccttatgggaacgcacagcggcgaacggtatcgagcgcgaatggcttaacgccgacgaactgcgcgagcgcgaaccgaatatcaccgggctcggcggcatttttgtgccgtccagcggcattgtcagctaccgcgacgtgacggcggcgatggcaaaaatcttccagtccagaggcggtgaaattatctataacgccgaagtcagcgggcttaatgagcataaaaacggcgtggtgatacgtacccgtcagggcggcgaatatgaagcatcaacgctgattagctgttccgggctgatggctgaccggctggtgaaaatgctcggactcgaaccgggctttatcatctgcccgttccgtggcgagtatttccgccttgcgccggagcataaccagattgttaaccacctgatttaccccattcccgacccggcaatgccgtttttgggcgttcatctcacccgcatgatcgacggcagcgtgaccgtcgggccaaacgcggtgctggctttcaaacgcgaaggctatcgcaagcgcgacttctcatttagcgacacgctggagattttgggctcgtcggggattcgccgggtgctgcaaaaccatctacgctcaggactgggcgagatgaaaaactcgctgtgcaaaagcggctatctgcggctggtgcaaaagtattgtccccggctttcgttaagcgatctccagccctggcccgccggtgtgcgggcgcaggcggtatcgccggacggcaagctgattgacgattttctgtttgtcaccaccccgcgcacgatccacacctgcaatgcgccctccccggcagcgacatcagcaattcctattggtgcgcatattgtcagcaaggtacaaacgctgttggcaagccagagtaaccccggacgcacgctgcgagcggcacgtagtgtggatgccttacacgccgcatttaatcaataacctttgaaaacaggatgtagcgatgaaacttaacgacagtaacttattccgccagcaggcgttgattaacggggaatggctggacgccaacaatggtgaagccatcgacgtcaccaatccggcgaacggcgacaagctgggtagcgtgccgaaaatgggcgcggatgaaacccgcgccgctatcgacgccgccaaccgcgccctgcccgcctggcgcgcgctcaccgccaaagaacgcgccaccattctgcgcaactggttcaatttgatgatggagcatcaggacgatttagcgcgcctgatgaccctcgaacagggtaaaccactggccgaagcgaaaggcgaaatcagctacgccgcctcctttattgagtggtttgccgaagaaggcaaacgcatttatggcgacaccattcctggtcatcaggccgataaacgcctgattgttatcaagcagccgattggcgtcaccgcggctatcacgccgtggaacttcccggcggcgatgattacccgcaaagccggtccggcgctggcagcaggctgcaccatggtgctgaagcccgccagtcagacgccgttctctgcgctggcgctggcggagctggcgatccgcgcgggcgttccggctggggtatttaacgtggtcaccggttcggcgggcgcggtcggtaacgaactgaccagtaacccgctggtgcgcaaactgtcgtttaccggttcgaccgaaattggccgccagttaatggaacagtgcgcgaaagacatcaagaaagtgtcgctggagctgggcggtaacgcgccgtttatcgtctttgacgatgccgacctcgacaaagccgtggaaggcgcgctggcctcgaaattccgcaacgccgggcaaacctgcgtctgcgccaaccgcctgtatgtgcaggacggcgtgtatgaccgttttgccgaaaaattgcagcaggcagtgagcaaactgcacatcggcgacgggctggataacggcgtcaccatcgggccgctgatcgatgaaaaagcggtagcaaaagtggaagagcatattgccgatgcgctggagaaaggcgcgcgcgtggtttgcggcggtaaagcgcacgaacgcggcggcaacttcttccagccgaccattctggtggacgttccggccaacgccaaagtgtcgaaagaagagacgttcggccccctcgccccgctgttccgctttaaagatgaagctgatgtgattgcgcaagccaatgacaccgagtttggccttgccgcctatttctacgcccgtgatttaagccgcgtcttccgcgtgggcgaagcgctggagtacggcatcgtcggcatcaataccggcattatttccaatgaagtggccccgttcggcggcatcaaagcctcgggtctgggtcgtgaaggttcgaagtatggcatcgaagattacttagaaatcaaatatatgtgcatcggtctttaactggagaatgcgaatgaacagcaataaagagttaatgcagcgccgcagtcaggcgattccccgtggcgttgggcaaattcacccgattttcgctgaccgcgcggaaaactgccgggtgtgggacgttgaaggccgtgagtatcttgatttcgcgggcgggattgcggtgctcaataccgggcacctgcatccgaaggtggtggccgcggtggaagcgcagttgaaaaaactgtcgcacacctgcttccaggtgctggcttacgagccgtatctggagctgtgcgagattatgaatcagaaggtgccgggcgatttcgccaagaaaacgctgctggttacgaccggttccgaagcggtggaaaacgcggtaaaaatcgcccgcgccgccaccaaacgtagcggcaccatcgcttttagcggcgcgtatcacgggcgcacgcattacacgctggcgctgaccggcaaggtgaatccgtactctgcgggcatggggctgatgccgggtcatgtttatcgcgcgctttatccttgcccgctgcacggcataagcgaggatgacgctatcgccagcatccaccggatcttcaaaaatgatgccgcgccggaagatatcgccgccatcgtgattgagccggttcagggcgaaggcggtttctacgcctcgtcgccagcctttatgcagcgtttacgcgctctgtgtgacgagcacgggatcatgctgattgccgatgaagtgcagagcggcgcggggcgtaccggcacgctgtttgcgatggagcagatgggcgttgcgccggatcttaccacctttgcgaaatcgatcgcgggcggcttcccgctggcgggcgtcaccgggcgcgcggaagtaatggatgccgtcgctccaggcggtctgggcggcacctatgcgggtaacccgattgcctgcgtggctgcgctggaagtgttgaaggtgtttgagcaggaaaatctgctgcaaaaagccaacgatctggggcagaagttgaaagacggattgctggcgatagccgaaaaacacccggagatcggcgacgtacgcgggctgggggcgatgatcgccattgagctgtttgaagacggcgatcacaacaagccggacgccaaactcaccgccgagatcgtggctcgcgcccgcgataaaggcctgattcttctctcctgcggcccgtattacaacgtgctgcgcatccttgtaccgctcaccattgaagacgctcagatccgtcagggtctggagatcatcagccagtgttttgatgaggcgaagcagtagcgccgctcctatgccggaggcgacgctgcgcgtcttgtccggcctacggggatccaggtcggataaggcgtttacgccgcatccgacaatctgtacgtgaacaggaagaaatctatgttggccgggtaaggcggagccgctctccggcaaaaagaatcaataacaattatacgcgtgacccggcgcgggaaatgtcggggcgctctcccaagtgacacactttcgagaggattcaggatggggcaatcatcgcaaccacatgagttaggcggcgggctgaagtcacgccacgtcaccatgttgtctattgccggtgttatcggcgcaagtctgtttgtcggttccagcgtcgccatcgccgaagcgggcccggcggtattactggcctatctgttcgccgggctactggtggttatgattatgcggatgttggcggaaatggcggttgccacgcccgataccggttcgttttccacctatgccgataaagccattggtcgctgggcgggctataccatcggctggttgtactggtggttttgggtactggttatcccgctggaagccaacatcgccgccatgatcctgcactcatgggttccaggcattcccatctggttattttccctcgtcattaccctcgccttaactggcagtaacttattaagcgttaaaaactacggcgaatttgagttctggctggcgctgtgcaaagtcatcgctatcctggcctttattttccttggtgcagtcgcaattagcggtttttacccgtatgccgaagtgagcgggatctcaagattgtgggatagcggcggctttatgcccaacggtttcggtgcggtattaagcgcgatgttgatcaccatgttctcgtttatgggcgcagaaattgtcaccattgccgccgcggaatccgacacgccggaaaaacatattgtccgcgccaccaactcggttatctggcgtatttctatcttctatttatgttctatttttgtcgtcgtggcattaattccgtggaatatgcccggactaaaagccgtcggttcttatcgctcggtactggaattgctcaatattccccatgcgaaattaatcatggactgcgtgatattactttccgtaaccagttgcctgaactcggcgctgtataccgcgtcaaggatgctctactccttaagtcgtcgcggtgatgctcccgcggtaatgggtaaaatcaaccgcagtaaaaccccgtacgtggcggtgttactctccaccggcgcggcattcttaacggtggtggtgaactattacgcgcctgcgaaggtatttaaatttctgatcgacagctccggcgctatcgccctgctggtttatttagtcatcgccgtttcacagttgcggatgcgcaaaattctgcgagcagaaggaagcgaaattcgcttgcgaatgtggctttatccgtggctcacctggctagtcatcggctttattacctttgtgttggtagtgatgctattccgtccggcgcaacagttagaagtgatctccaccggcttattagcgatagggattatctgtaccgtgccaattatggctcgctggaaaaagctggtattgtggcaaaaaacacccgttcataatacgcgctgatcatgatcaggagtcacaccatgaccatttcgtctctggatggctatcgctggctgaagaacgatattattcgcggtaattttcaaccggatgaaaaattacgaatgagtttgctgacatcgcgttatgcacttggcgttgggccgttacgggaagctctttcgcaactggtggcggaacggctggtcacggtggtgaatcaaaaagggtatcgggtggcgtctatgtcagagcaggagctgctcgatattttcgacgcccgcgccaatatggaagcgatgttagtgagtctggcgattgcccgcggtggcgatgagtgggaggcagacgttctcgcaaaagcgcatctgctgagtaagcttgaggcctgtgacgccagcgagaaaatgcttgatgagtgggatctgcgtcatcaggcgtttcatacggcaattgtggcgggctgtggttctcactatttgctgcaaatgcgtgaacggttgtttgatctggcggcgcgttatcgatttatctggctgcggcgaacggtgctttcggtggaaatgctggaggataaacacgatcagcaccagaccctgactgcggcggtactggcgcgagataccgcgcgcgccagtgagttaatgcgccagcatttactgacgccaattcccattatccagcaggcgatggctggcaattaactactcttccggaatacgcaacacttgccccggataaattttatccgggctttttagcatcggtttattcgcttcgaagattttattgtacagattagcgttaccgtagacctgtttggaaatggcactcagagtgtcgccagacttaacggtataaaactggctggcagtggctggtgtcgccgttttcacctgatcatcgacactggcaataccggaaatattccccaccgcaacaaggattttctccttcgcctcctgactcaggccgtcaccagtgaccgtcgctttgccgtcggcaatttgaatattcactttatcggcatccggtataccggttttgttcagatgctcctgcaccttcttcgcctgatcgtctttatcgtgctgacctgtaaccgcgtcccagagtttttctccggcatctttcacaaaattgaacagacccatagctacctcattcgttaacggaaacactcagaaagtgtagcagaggaacgcggcgcgttaacgccgcggggatgagcacaggtttaatcgcgggtttgcacccagaacgcgtgaatcaaaccggggatatacccaagcagtgtcaacagaatattaataatgaacgcccaaccgaaccctttaccgagcagcacgccgagcggcggcagaatgatggtgatgacgattctccagaaacccatatgtactccctataagaaaattactcattgtttaaaaagagattttatctcttaagcgtagtaattttagcggagcctgccagtttcagcttacgcttttactctcatttacgctgctgaggctggtatatgttgcatttttagtttagagtttacttaatttagaaaatacttaaataaatatgactgaactcgcgcaattacaggccagtgccgaacaggcagcggccttattgaaagcaatgagccaccctaaacgattgctgattctgtgcatgcttagcggttcccccggcaccagcgcgggagagctgacgcgcattaccggactgagtgcctctgcgacatcacagcatctcgctcgtatgcgggacgaagggcttatcgacagccaacgggatgcccaacgcattctatattccattaaaaatgaggcggtaaatgccattatcgccaccctgaaaaatgtctattgtccgtaaggagtcactatggctttgacaaccatttcgccgcatgatgcacaagaattaatcgcacgcggcgcaaagttaatcgatattcgtgatgctgatgaatatcttcgtgaacatattcctgaagcagatctggctccattatccgtgctggaacagtcaggtcttccggctaaattacgtcacgagcaaattatattccactgccaggcaggtaaacgcaccagtaataatgccgataaattagcagcgattgccgcccccgcagaaatctttttactcgaagatgggattgatggctggaaaaaagcaggattgccagtagcggtaaataaatctcaacccttgccgttaatgcgccaggtgcagatcgctgcgggtggtttaatattaatcggcgttgtactgggttataccgtaaatagcgttttcttcttattaagtggctttgttggtgccgggttactgtttgcaggaatcagcggtttttgtggaatggcaaggttgttagataagatgccgtggaaccaacgagcttgagaagcgacgccggacgcgccctagcagcgacatccggcctcagtaattagatcaggaaatcgtcgagagatttaccttctgccagcgcctgagcaattggcttcggtgtacggccctgaccggtccaggttttagtttcaccgttaacatcggtgaatttatatttcgccggacgcggctggcgttttttaccagcgcgtggtgcagcagcagagctattacccaataactcttccgggttaattccgtcagctttcatcagctccagccaggtgctaattttttcctggcgctctgccagttcacgctgctgctgttcttcttcttcacgtctttctttagtgacaaccctgaatttttcgagcatttcttcaagaacgtcaatggagaattcgcgagccatcgcacggagggtgcgaatgttatttaaactttgtaacattacggacataataaagaaaaccttttaacgccaaaacaaaaaaagtatttcgtcgcatagtgtaagcgatcacttattatatttccacaaaatttaatctatttacagtcctgcgcgagattatttcagctgttattttctgaaactctcagaataatttcaagattatatattagccattttgatgagtaatttagattattggtgaacagagcggcgctctctgctcgctaattccgcaagcctgacaaaatcaaagtgaataaaaatgcaatataacagaataaaagaaaacatccatcactggtgctttctgctgttaatgtacattgtctggcataaaaaatgctgaaaatgacccagctactacatacaccgaattctctacgcttatagcgttacctcacccccaaactttcattagtgatattaaaggtaaggccatatctaattgatttaattaaaaataaatcatatcggcatgtaaaaatccacaatgtacaaaaaacgagccgttacggaatattttatctacaaaaactgactaaataaaaatttttcactaattgattagtcatagccagcgatatacgctatgcgaaaatgcagatggcaatgagatccactgctttcatctccattaacatcccattacgcttttattaaggagcattagcatgttctcaccgcagtcacgcttgcgtcatgcagttgcagatacgttcgcgatggttgtttactgttctgtcgtgaacatgtgtattgaagttttcctttccggaatgagcttcgaacagtctttttattccagattggtagcgattccggtgaacatcttaattgcatggccatacggtatgtaccgtgatctgtttatgcgcgcggcacgcaaagttagcccgtcgggctggataaaaaatctggcggatatcctggcttatgtgacgttccagtcaccggtgtatgtggcgatcttgttagtggtgggcgcagactggcatcagattatggcggcggtcagttcaaacatcgttgtttcgatgttgatgggggcggtttatggctacttcctcgattattgccgccgactgtttaaagtcagccgttaccagcaggtaaaagcctgactcttcttttcgcgactggcatcgccagtcgcgtctttaactggcttcgccaaataaaccattcaaataacgttcaagcgcaacacgcgaactaaagccatgcgggataccgtaatgctcgtgtcgctcgcctgctaaatagagcggaaattgctggtaatgatcgcaagttttaatatcggaagcgggttcagccagtgtcgaactgcgttcttttaatgttggatgaattaccagagcggtacgtcccattcgcgcttcgcgattaacatagacataattttccccacggcggtaaccatacgctttctgggttaccacatcgacagtaaaaccgactttttcaagtacgcgcgccacctcgtctggtcgtaaatacatatttgatcctcgttattatcaaccgcgggcctaccttacctgattgcgcattcacaacgctttcagaaaagtccataaagccgcgatgaacctcagttaagaaaattatggtctacactgaaaattacatcgaattctaatgggggatcatatgtttaaccgaccgaaccgcaacgacgttgatgatggcgtgcaggatatccagaatgatgtcaatcaattagctgacagcctcgaatctgtattgaagtcctggggcagcgacgccaaaggggaagctgaagccgcacgcagtaaagctcaggcattgctgaaagaaaccagggcgcgaatgcatggtcgtactcgcgtccagcaagccgcgcgcgatgccgttggctgcgcggattcttttgttcgtgaaagaccctggtgtagcgtgggtacagcagctgcggtaggtatttttatcggcgcactgttaagcatgcgcaaatcgtagtgcaaaaatgataataaatacgcgtctttgaccccgaagcctgtcttcggggtttctttttgcctggtgaatcacaaaaatccccctaccccgtcacgctcatatccagggtaatttcgaccactatttgctatatattgtgtggttgaatcttttttcaactacatctagtatctctgtatcaacagagagacaacccgacgcgtatcatcgcgccgtatcttcattttaaacggaaatacgaatcatgcgcattactatttacactcgtaacgattgcgttcagtgccacgccaccaaacgggcgatggaaaaccggggctttgattttgaaatgattaatgtcgatcgcgttcctgaagcggcagaagcgttgcgtgctcagggctttcgtcagttgccggtagtgattgctggcgatcttagctggtctggtttccgtccggacatgattaaccgtctgcatccagcgccacacgcggccagtgcatgagccagctcgtctacttctccagcagctccgaaaacacgcagcgttttatcgaacgtttaggtctgcccgcggtgcgcatcccgctcaatgagcgggaacggattcaggtagacgagccttacatcctgatcgtgccctcttacggcggcggcggtacggctggcgcggtgccacgacaggtaattcgctttttaaacgacgagcacaaccgggcgttgcttcgcggcgttattgcttctggtaatcgcaactttggtgaggcgtatggccgcgccggagatgtgattgcccggaaatgcggcgtgccgtggctgtaccgttttgaactcatgggtacgcaaagcgatatcgaaaacgttcgtaaaggagtaaccgaattttggcaacgacaaccgcagaatgcctgacgcaggaaacgatggattaccacgcgctgaatgcgatgcttaacctctacgatagcgcaggtcgcattcagttcgataaagaccgccaggccgttgacgcctttattgcgacgcatgtgcgtccgaacagtgtgaccttcagtagccagcagcagcgcctgaactggctggtcaacgaaggttactatgatgaaagcgttcttaatcgctactctcgcgactttgtcattacgctgtttgcccacgcacacaccagcggttttcgtttccagacattcctcggggcatggaagttttacaccagctatacgttgaagacattcgacggtaaacgttatctggaagattttgccgatcgagtaacgatggtggcgctgacgctggcacaaggcgatgagacgctggcgttgcaactgaccgatgaaatgctgtcaggacgctttcagccagccacgccaacattcctcaactgcggtaagcagcagcgcggcgaactggtttcctgttttttgctgcgtattgaagacaatatggagtcgattggtcgggcggtaaattccgcactgcagctgtcgaaacgcggcggcggcgtagcatttttgctgtcgaatctgcgagaagcgggcgcgccaattaaacgtattgaaaatcaatcttctggcgtaattccggtgatgaaaatgctggaagacgcattttcctatgccaaccaactcggcgctcgtcagggggctggtgcagtctatttacatgctcatcatcccgatattctgcgttttctcgacacgaaacgggaaaatgccgacgaaaaaatccgcattaaaacactgtcgcttggcgtggtgatcccggatatcactttccatctggcaaaagagaatgcgcagatggcgctgttttcgccttatgacgtagagcgagtttatggcaagccgtttgccgatgtggccatcagccaacactatgacgaactggttgccgatgaacgcattcgcaaaaaatacctcaacgcccgtgatttcttccagcgactggcagaaatccagtttgagtccggctatccctacatcatgtatgaagacacggtaaaccgtgctaaccctatcgccgggcgcataaatatgagtaatctctgctcagaaattttgcaggttaacagcgcctcagagtatgacgagaatctcgactatacccgcacaggccatgatatttcctgcaatttaggttcgttgaatattgcgcacaccatggattcccccgattttgcccgcacggtagagactgccgtgcgcggtttaacggcagtatcagatatgagtcatatccgcagcgtgccgtccatcgaagccggaaatgccgcctcgcacgccatcggactggggcagatgaatttacacggctatctggcgcgagaaggcatcgcttatggttcgccggaagcactggatttcaccaatctctatttctatgccatcacctggcatgcactgcgtacctcgatgttgctggcacgcgaacgcggtgaaaccttcgccgggttcaaacagtcacgctatgccagtggtgaatattttagccaatatctgcaagggaactggcagccgaaaacggcgaaagttggcgaactgtttacccgtagcggtattacgttacctacccgtgagatgtgggcgcagctgcgcgacgacgtgatgcgctacggcatatacaaccagaatcttcaggcggtgccgccaaccggttctatctcttatatcaaccatgctacgtcgagtattcatccgattgtggcgaaagtagagatacgcaaagagggcaaaacaggacgcgtttactaccctgccccgtttatgactaacgagaatctggcgctgtatcaggacgcttacgaaattggcgcagaaaagatcatcgacacctacgcggaagcgactcgccatgtcgatcaggggctgtcgctgacgctttttttccccgataccgccaccactcgcgatatcaacaaagcgcagatttacgcctggcgcaagggtatcaaaacgctctattacatccgcctgcgtcagatggcgctggaaggcactgaaattgaaggctgcgtctcctgtgcactttaaggaatatctatgaaactctcacgtatcagcgccatcaactggaacaagatatctgacgataaagatctggaggtgtggaatcgcctgaccagcaatttctggctaccagaaaaggtgccgctgtcgaacgatattcctgcctggcagacattaactgtcgtagaacaacaactgacgatgcgcgtttttactggcctgacgctgctcgacacgctgcaaaatgttatcggcgcgccttctctgatgcccgatgcactcacgcctcatgaagaagcggtattatcgaatatcagctttatggaagcggttcatgcccgctcttacagttcgattttctcgacgctatgccagaccaaagatgtcgatgccgcctacgcctggagtgaagaaaacgcaccgttgcagcgaaaagctcagattattcagcaacattatcgcggtgatgatccgctgaaaaagaaaatcgccagtgtgtttcttgaatcttttttgttctattccggtttctggctgccgatgtatttttccagccgcggaaagctgaccaataccgcggacctgatccgtctgattatccgcgatgaagcagtccacggttactacataggctataaatatcagaaaaacatggaaaagatatctctgggacaacgtgaagagttgaagagtttcgccttcgatttgttgctggaactctacgacaacgagttgcaatacaccgatgagctgtacgccgaaaccccgtgggctgacgatgtgaaagcgtttctctgttacaacgccaataaggctttgatgaatctgggctacgaaccgttatttcccgcagaaatggcggaagtgaatccggcaatcctcgccgcgctttcgccgaatgccgatgaaaatcacgatttcttttccggttcaggctcctcttatgtgatggggaaagcggttgaaacagaagatgaagactggaatttctgagggtgttattttcaaaaatatcactacccgcagcagggaaataattcccgccaaatagctttttatcacgcaaataatttgtggtgatctacactgatactctgttgcattattcgcctgaaaccacaatattcaggcgttttttcgctatctttgacaaaaaatatcaactttctcgatttgctctcagcccttatatcacgggaaattccggcgatttgctcgcatcaatattcatgccacatttgccatcaggggttgcctcagattctcagtatgttagggtagaaaaaagtgactatttccattgggtaatatatcgacatagacaaataaaggaatctttctattgcatggcaattaaattagaaattaaaaatctttataaaatatttggcgagcatccacagcgagcgttcaaatatatcgaacaaggactttcaaaagaacaaattctggaaaaaactgggctatcgcttggcgtaaaagacgccagtctggccattgaagaaggcgagatatttgtcatcatgggattatccggctcgggtaaatccacaatggtacgccttctcaatcgcctgattgaacccacccgcgggcaagtgctgattgatggtgtggatattgccaaaatatccgacgccgaactccgtgaggtgcgcagaaaaaagattgcgatggtcttccagtcctttgccttaatgccgcatatgaccgtgctggacaatactgcgttcggtatggaattggccggaattaatgccgaagaacgccgggaaaaagcccttgatgcactgcgtcaggtcgggctggaaaattatgcccacagctacccggatgaactctctggcgggatgcgtcaacgtgtgggattagcccgcgcgttagcgattaatccggatatattattaatggacgaagccttctcggcgctcgatccattaattcgcaccgagatgcaggatgagctggtaaaattacaggcgaaacatcagcgcaccattgtctttatttcccacgatcttgatgaagccatgcgtattggcgaccgaattgccattatgcaaaatggtgaagtggtacaggtcggcacaccggatgaaattctcaataatccggcgaatgattatgtccgtaccttcttccgtggcgttgatattagtcaggtattcagtgcgaaagatattgcccgccggacaccgaatggcttaattcgtaaaacccctggcttcggcccacgttcggcactgaaattattgcaggatgaagatcgcgaatatggctacgttatcgaacgcggtaataagtttgtcggcgcagtctccatcgattcgcttaaaaccgcgttaacgcagcagcaaggtcttgatgcggcgctgattgatgcgccgttagcagtcgatgcacaaacgcctcttagcgagttgctctctcatgtcggacaggcaccctgtgcggtgcccgtggtcgacgaggaccaacagtatgtcggcatcatttcgaaaggaatgctgctgcgcgctttagatcgtgagggggtaaataatggctgatcaaaataatccgtgggataccacgccagcggcggacagtgccgcgcaatccgcagacgcctggggtacaccgacgactgcaccgactgacggcggtggtgctgactggctgaccagtacgcctgcgccaaacgtcgagcattttaatattctcgatccgttccataaaacgctgatcccgctcgacagttgggtcactgaagggatcgactgggtcgttacccatttccgtcccgtcttccagggcgtgcgcgttccggttgattatatcctcaacggtttccagcaattgctgctgggtatgcccgcaccggtggcgattatcgttttcgctctcatcgcctggcagatttccggggtcggaatgggtgtggcgacgctggtttcgctgattgccatcggcgcaatcggtgcctggtcgcaggcaatggtgactctggcgctggtgttaaccgccctgctgttctgtatcgtcatcggtttgccgttggggatatggctggcgagaagtccgcgagcggcgaaaattattcgtccactgcttgatgccatgcagaccacgccagcgtttgtttatctggtgccaatcgtcatgctatttggtatcggtaacgtgccgggcgtggtggtgacgatcatctttgctctgccgccgattatccgtctgaccattctggggattaaccaggttccggcggatctgattgaagcctcgcgctcattcggtgccagcccgcgccagatgctgttcaaagttcagttaccgctggcgatgccgaccattatggcgggcgttaaccagacgctgatgctggccctttctatggtggtcatcgcctcgatgattgccgtcggcgggttgggtcagatggtacttcgcggtatcggtcgtctggatatggggcttgccaccgttggcggcgtcgggattgtgatcctcgccattatcctcgatcgtctgacgcaggccgttgggcgcgactcacgcagtcgcggcaaccgtcgctggtacaccactggccctgttggtctgctgacccgcccattcattaagtaactctgcacttgcccggtgacgccgggcattatcaccctgccaaaaaaaggaataacaatgcgacatagcgtactttttgcgacagcgtttgccacgcttatctctacacaaacttttgctgccgatctgccgggcaaaggcattactgttaatccagttcagagcaccatcactgaagaaaccttccagacgctgctggtcagtcgtgcgctggagaaattaggttataccgtcaacaaacccagcgaagtagattacaacgttggctacacctcgcttgcttccggcgatgcaaccttcaccgccgtgaactggacgccactgcatgacaacatgtacgaagctgccggtggcgataagaaattttatcgtgaaggggtatttgttaacggcgcggcacagggttacctgatcgataagaaaaccgccgaccagtacaaaatcaccaacatcgcacaactgaaagatccgaagatcgccaaactgttcgataccaacggcgacggaaaagcggatttaaccggttgtaaccctggctggggctgcgaaggtgcgatcaaccaccagcttgccgcgtatgaactgaccaacaccgtgacgcataatcaggggaactacgcagcgatgatggccgacaccatcagtcgctacaaagagggcaaaccggtgttttattacacctggacgccgtactgggtgagtaacgaactgaagccgggcaaagatgtcgtctggttgcaggtgccgttctccgcactgccgggcgataaaaacgccgataccaaactgccgaatggtgcgaattatggcttcccggtcagcaccatgcatatcgttgccaacaaagcctgggccgagaaaaacccggcagcagcgaaactgtttgccattatgcagttgccagtggcagatattaacgcccagaacgccattatgcatgacggcaaagcctcagaaggcgatattcagggacacgttgatggttggatcaaagcccaccagcagcagttcgatggctgggtgaatgaggcgctggcagcgcagaagtaatttttattcgggcggataaggcgtttttgccgcatccgccgttctgtgcacaatgcctgatgcgacgctggcgcgtcttatcatgcctacaaaccacatcgcacatttcaacaatctatctttcatcccatattcatcaacatccgctattattgatttccagcttaatcatcacctgatgaacaaaaataatgactaaacctaatcatgagcttagcccggcgctgatcgtgctgatgtctatcgccaccggtctggcggtagccagtaactattacgcccagccattgctcgacaccatcgcgcgtaacttttccctttccgccagttcggcaggctttattgttaccgccgcgcagttgggctatgccgcaggtctactgtttcttgttcccctcggtgatatgtttgaacgccgccgcctgattgtctcgatgaccttactggcggcatgcggcatgttgattaccgccagcagtcagtcgctggcgatgatgatcctcggtacggcattaaccggtttattctcagtcgtggcacaaattctggttccgctggcagcgacgctggcttcaccggataaacgcggcaaagtggttggcactattatgagcggtctgctgttggggatcttgctggcacggacagttgccggattgctggcgaatctcggcggctggcgcaccgtcttttgggttgcttcggtgttaatggcactgatggcgctggcattatggcgtggtctgccacaaatgaaatcagaaacccacctcaactacccacagttgttgggttccgttttcagtatgtttatcagcgataaaattctgcgtacccgcgcgttgctgggctgcctgacctttgccaatttcagcattctctggacctcaatggcctttttgcttgccgctccaccttttaactacagcgatggtgtcattggtctgtttggacttgcgggagctgccggagcgttgggcgctcgtccggcgggcggttttgccgataagggcaaatcgcaccacaccacaactttcggtctgctgctgctattactttcatggctggcgatctggtttggtcacacttccgtactggcgttgattatcggaatcctggtgctggatctcaccgtgcagggcgtgcatatcactaaccagacggtaatttatcggatacatcctgatgcgcgcaatcgcctgaccgcaggttacatgactagctactttattggcggtgccgccggttcgctaatttcagcctcagcctggcaacatggcggttgggctggcgtttgtctggctggcgcgacgattgccctggttaacttactggtctggtggcgaggttttcatcgtcaggaagccgcaaattaagcaatcagcaaccgttttcgtggctttacacttataagggtgttaagaagcccatcagtctgataaggttaagatattcattcagtctatttataatattaacaatcgttaagcgtacactctatggaaagccctactccacagcctgctcctggttcggcgaccttcatggaaggatgcaaagacagtttaccgattgttattagttatattccggtggcctttgcgttcggtctgaatgcgacccgtctgggattctctcctctcgaaagcgtttttttctcctgcatcatttatgcaggcgcgagccagttcgtcattaccgcgatgctggcagccgggagtagtttgtggattgctgcactgaccgtcatggcaatggatgttcgccatgtgttgtatggcccgtcactgcgtagccgtattattcagcgtctgcaaaaatcgaaaaccgccctgtgggcgtttggcctgacggatgaggtttttgccgccgcaaccgcaaaactggtacgcaataatcgccgctggagcgagaactggatgatcggcattgccttcagttcatggtcatcgtgggtatttggtacggtaataggggcattctccggcagcggcttgctgcaaggttatcccgccgttgaagctgcattaggttttatgcttccggcactctttatgagtttcctgctcgcctctttccagcgcaaacaatctctttgcgttaccgcagcgttagttggtgcccttgcaggcgtaacgctattttctattcccgtcgccattctggcaggcattgtctgtggctgcctcactgcgttaatccaggcattctggcaaggagcgcccgatgagctatgaggttctgctgcttgggttactagttggcgtggcgaattattgcttccgctatttgccgctgcgcctgcgtgtgggtaatgcccgcccaaccaaacgtggcgcggtaggtattttgctcgacaccattggcatcgcctcgatatgcgctctgctggttgtctctaccgcaccagaagtgatgcacgatacacgccgtttcgtgcccacgctggtcggcttcgcggtactgggtgccagtttctataaaacacgcagcattatcatcccaacactgcttagtgcgctggcctatgggctcgcctggaaagtgatggcgattatataacccacaagaatcatttttctaaaacaatacatttactttatttgtcactgtcgttactatatcggctgaaattaatgaggtcatacccaaatggatagttcgtttacgcccattgaacaaatgctaaaatttcgcgccagccgccacgaagattttccttatcaggagatccttctgactcgtctttgcatgcacatgcaaagcaagctgctggagaaccgcaataaaatgctgaaggctcaggggattaacgagacgttgtttatggcgttgattacgctggagtctcaggaaaaccacagtattcagccttctgaattaagttgtgctcttggatcatcccgtaccaacgcgacgcgtattgccgatgaactggaaaaacgcggttggatcgaacgtcgtgaaagcgataacgatcgccgctgcctgcatctgcaattaacggaaaaaggtcacgagtttttgcgcgaggttttaccaccgcagcataactgcctgcatcaactctggtccgcgctcagcacaacagaaaaagatcagctcgagcaaatcacccgcaaattgctctcccgtctcgaccagatggaacaagacggtgtggttctcgaagcgatgagctaacgcgtcatctcgctcaaaaatccagatttataaaagaaaaaatgactggccagcatcgcaacatgctggcctttttggcaagcaggtcggctcagccgatgagttaagaagatcgtggagaacaatatgagcgcaaatgcggagactcaaaccccgcagcaaccggtaaagaagagcggcaaacgtaagcgtctgctcctccttctcaccttgctctttataattattgccgtagcgatagggatttattggtttttggtactgcgtcacttcgaagaaaccgatgacgcatacgtggcagggaatcaaattcaaattatgtctcaggtgtctggcagcgtgacgaaagtctgggccgataacaccgattttgtaaaagaaggcgacgtgctggtcactctcgacccgacagatgctcgccaggcgtttgaaaaagccaaaactgcactggcttccagcgttcgccaaacccaccagctgatgattaacagcaagcagttgcaggcgaatattgaggtgcagaaaatcgccctcgcgaaagcacaaagcgactacaaccgccgtgtgccgctgggcaatgccaacctgattggtcgcgaagagctgcaacacgcccgcgacgccgtcaccagtgcccaggcgcaactggacgtcgcgattcaacaatacaatgccaatcaggcgatgattctggggactaaactggaagatcagccagccgtgcaacaggctgccaccgaagtacgtaacgcctggctggcgctggagcgtactcgtattatcagtccgatgaccggttatgtctcccgccgcgcggtacagcctggggcgcaaattagcccaacgacgccgctgatggcggtcgttccagccaccaatatgtgggtggatgccaactttaaagagacgcagattgccaatatgcgtatcggtcagccggtcactatcaccacggatatttacggcgatgatgtgaaatacaccggtaaagtggttggtctggatatgggcacaggtagcgcgttctcactgcttccagcgcaaaatgcgaccggtaactggatcaaagtcgttcagcgtctgcctgtgcgtatcgaactggaccagaaacagctggagcaatatccgctgcgtatcggtttgtccacgctggtgagcgtcaataccactaaccgtgacggtcaggtactggcaaataaagtacgttccactccggtagcggtaagcaccgcgcgtgaaatcagcctggcacctgtcaataaactgatcgacgatatcgtaaaagctaacgctggctaatccagaggtgcgtgtgatgcaacagcaaaaaccgctggaaggcgcgcaactggtcattatgacgattgcgctgtcactggcgacattcatgcaggtgctggactccaccattgctaacgtggcgatccccactatcgccgggaatctgggctcatcgctcagccagggaacgtgggtaatcacttctttcggggtggcgaatgccatctcgatcccgcttaccggctggctggcaaagcgcgtcggggaagtgaaactgttcctttggtccaccatcgcctttgctattgcgtcgtgggcgtgtggtgtctccagcagcctgaatatgctgatcttcttccgcgtgattcaggggattgtcgccgggccgttgatcccgctttcgcaaagtctattgctgaataactacccgccagccaaacgctcgatcgcgctggcgttgtggtcgatgacggtgattgtcgcgccaatttgcggcccgatcctcggcggttatatcagcgataattaccactggggctggatattcttcatcaacgtgccgattggcgtggcggtggtgttgatgacactgcaaactctgcgcggacgtgaaacccgcaccgaacggcggcggattgatgccgtggggctggcactgctggttattggtatcggcagcctgcagattatgctcgaccgcggtaaagagctggactggttttcatcacaggaaattatcatccttaccgtggtggcggtggtggctatctgcttcctgattgtctgggagctgaccgacgataacccgatagtcgatctgtcgttgtttaagtcgcgcaacttcaccatcggctgcttgtgtatcagcctcgcgtatatgctctacttcggcgctattgttctgctgccgcagttgttgcaggaggtctacggttacacggcgacctgggcaggtttggcctctgcgccggtagggattattccggtgatcctgtcgccgattatcggccgcttcgcgcataaactggatatgcggcggctggtaaccttcagctttattatgtatgccgtctgcttctactggcgtgcctatacctttgaaccaggtatggattttggcgcgtcggcctggccgcagtttatccaggggtttgcggtggcctgcttctttatgccgctgaccaccattacgctgtctggtttgccaccggaacgactggcggcggcatcgagcctctctaactttacgcgaacgctggcggggtctatcggcacgtcgataaccacgaccatgtggaccaaccgcgagtcgatgcaccatgcgcagttgactgagtcggtaaacccgttcaacccgaatgcccaggcgatgtacagtcaactggaagggcttgggatgacgcaacagcaggcatcaggctggattgcccagcagatcaccaatcaggggctgattatttccgccaatgagatcttctggatgtcagccgggatattcctcgtcctgctggggctggtgtggtttgctaaaccgccatttggcgcaggtggcggcggaggcggtgcgcactaagtacaactaagccagttcatttgaactggcttttttcaattaattgtgaagatagtttactgactagatgtgcagttcctgcaacttctctttcggcagtgccagttcttcgttgctgttgatgcgtacgtcacgttccagaatgctacgcgcaatatcctgcgcttcctgcaacgagtgcatctggtaagtgccacactggtagacgttcagttccgggatctgattctgatcctgcactttcagcacgtcttccattgccgctttccaggcatcagcaacacgctgctcatctggcgtaccaatcagactcatataaaaaccggtgcggcagcccattggcgagatatcgataatctctacaccattaccgttaagatggttacgcataaaaccagcaaacaggtgctccagggtatggatccctctttctggcatcacttctttgttcggcacgcagaagcgcagatcgaacacggtgattgcgtcgccatgcggggtgttcattgttttcgccacccgaactgcaggcgcttccatccgggtatgatcgactgtgaagctatctaacaacggcatttagccacctccggtaatttttttaaaaattttctgaactctttcttcccaggcgagtctgagtatatgaaagacgcgcatttgttatcatcatccctgaattcagagatgaaattttggccactcacgagtggcctttttcttttctgtcaggcgtgtttttccagccacaccgcaaacggttcggtatcagcggcttccatttcctgctgacggcgttcagacgcctcgcgctcggctacaaaatcctcttcgcgcagaatttccagcggctcttcacgcagcagattacggtaggcttctgcaaatgctttgcctgttccgccaataccagtatcaatcatagaccttaagatacgggcagagaaagtcagatcgggattatcgaagcaggcaaccagttcatcacacactttctgatacgcttcgccgccgttaatactatccagcgtttgcgcgacgcgtttcagatcgcggaacagatctttacccacctgcggtaacgggaactgtgcggtttcgcagccgatacccagcgtcagacccggtttgcgaccttcgaggatcacccggttccagttaacgcgtgtacaggcaagttcgctactgctcatttccggtgcatcagccagcgcacaccagaccataaacaggtcgaggaatcgcacctgctgttcatctacaccaatcggcgagaacgggttgatgtccagcgaacgcacttcaatatattcaatgccgccacgtaacagcgcatcagaaggcgactcgccgctgcgggtaacgcgttttggacgaatcggcgcgtacagttcgttttcaatctgcaacacgttgctgttgatttgcagcctcttaccgtctttctcaataccaatcttcgcgtactcttccgatggcgttttgattgcctgtttaaggcccgctacgtactcgtaaagatcgttgaaggtaataccaagattgctttgcgatttattggtatagccgagatcgctcaaacgaagagaggtcgcatacggcaggtaatacataccgcactcggttttctcaaacggcagcgacgttggttttccttgcaggaaagaagaacaaatcgccggagatgcaccaaacagataaggaatgacccaaccgaaacgatagtaattgcggataacgcggaaatagcccgcagaaattttctctttggcatcagcgcccgagatatcaccgcacttcgcttgccagaatgccattggcaaagagaaattgtagtgcacgccggaaatggtttgcatcagcgcgccgtagcgatttttcagcccttcacgatacagcgttttaaagcgtccggtgttagaagtgccgtactgtgccagttcgatgtcctgaccttctgcgatgtagcatggcatacttaacggccacatccgctcatcgcccatattgcgcgccgtataacgatgcagatcgcgcataaaggtcagcatatgttcaatatcaccatccactggtgtaatgaattccagcaatgcttccgcaaaatcggtagtaatccatttgtgcgtcagtgcggaacctaatgcttcaggatgacctgttgttgccagtgtgccatcagcattaacacgcaaagtttcgcgctccagcccacgctgtatcccctttaacgcctgaggatgtttttccagccaggccagcgcctgtgatacgtccgggatcaaattgacctcccgcctgtcaaaatcgttttaattagcataactgtaatggtgaccatatgtgcaggcctacaattagtgccaccacatcatgccctgaacggtcgctgctgcaactgcaacatagcgtaacgctttaccaaggcacaaaaaaaagattaccggtccccacgagatgcgcatccatcccgctaacagacacagtaaatcgccaaccacgggcatccagcttaataatagcgtgactgcaccatagcgtttcagccagccggtagctttctcttgccagcgcgatgttttacgcaatggaaagaaacgcccaaggataacgttagttaaccctccaaggctattacccattgttgctgttaaaactaaaacccagggatgactgatcccggaaagcaacattgccaccagcacgacttcggagttgccgggtaatagtgtagcgctgagaaaactactggcaaacaacgagaaaagcgataacgcttcactcacagcaagcgaacatccacggcgtccatgcctgctgcacgggccgcctgaataccgaaatcggcatcttcaaagaccacacactgcgtcggttgcacgcccatacgctgcgcgcacaacaaaaatgtgtctggcgcgggtttatggtgtttgacgtgatcggcagcgacgacggcgtcaaaataatggcgtaatcccaggtgcgccagcaatgcctcagcgatggcgctttcactccccgttcctacagccattgggcgacgaccatgccaacttttcaccacatcaacaagaggaagcggttcgacgctatccagcagcatacttcttactgcttctgttttttcacgcgctaacgcatgcgggtcgagatcggcctgattcagctcaataattgcctgagcaatacgccaggtgggcgatccattaagcgcaatcatcgcctgaatatcgtactgaagaccgtagtgccctaatacttcgcgccacgctttacggtgcgtaggctccgtatccaggattgtgccatccatatcaaaaattaaacctgcataacgctcgtacatggtcttctcgcaagtcgaaaaatatgacgctactttagcgtaattgcttgattttgtcgctgatggcgaaggagaagaaaattcaggaaatggataaaggagttatttagaaatgagatatttttgaaggaaattttttggagaagatggtgcatccgggaggatgactcactgacgttcgcccttcgggccgttgctggcgcaacgttatccttcctggtgcctgcggttattaccgccacctcttccataccttcatcgctgaaagttacgtagaatatggtgcatccgggaggattcgaacctccgaccgctcggttcgtagccgagtactctatccagctgagctacggatgcatcgggaaaacttactttactgcagattttgataccgctactaaagccgtatcaatnnnnnnnnnatcgggaaaacttattttactgctgatattgataccgctactaaagccatatcaagtaagagatggtgcatccgggaggattactcgccttgcggctcgcccttcgggccgttgctaaagcaacgttatcatccctagtgcctgcggttaattccgctacctcttcgataccttcattgctgaagatttcggagaatatggtgcatccgggaggattcgaacctccgaccgctcggttcgtagccgagtactctatccagctgagctacggatgcaaatggcggtgaggcggggattcgaaccccggatgcagcttttgaccgcatactcccttagcaggggagcgccttcagcctctcggccacctcaccacacgcctcttacgagtgcttcgaagaacttgtttatcgctcatcgtcgctgcgtggcgcacatattactttctgagacttataagtcaaacaatttttcctacacttttatcgtttgcacacttcacgttcaattagtctgtaaaaacgtcaaaaagagtgttttatcaacagaagaatggaggtctgacagatagtagtaatgcaaaaaaatggagacttaagttgaatgaacgggagtaaagcgaaaagactatagagtgaaggagaaattttgagggtgcgtctcaccgataaagatgagacgcggaaagattagtaactggactgctgggatttttcagcctggatacgctggtagatctcttcacggtgaacagaaacttccttcggggcatttacgccaatacgtacctggttgccctttacccctaaaactgtcacggtgacctcatccccaatcatgagggtctcaccaactcgacgagtcagaatcagcattctttgctccttgaaagattaaaagagtcgggtctctctgtatcccggcattatccatcatataacgccaaaaagtaagcaatgacaaacacattacatctaagcagtcatggcattacattctgttaaacctaagtttagccgatatacacaacttcaacctgactttatcgttgtcgatagcgttaatgcgaatgccgtgaagcgagtccacggcattgcctgacgcttatattattgcaatttcgcgctgacccagcctttcacactggctaacgctgcaggtaaggccgcagcatccgtaccaccggcttgcgccatgtcaggacgtccaccacccttgccgcccacctgctgagcgaccataccaatcagttcccctgctttcacacgatctgtgacgtccttagatacgcctgcaatcagagaaaccttaccttcgactaccgttgccagcacgataattgtcgaccccagctgattttttaaatcgtcaaccatggtacgcaacattttcggctcaacaccgctaagctcgctaaccaacagcttaacaccattaacatcaattgccttactggaaagatttgcgctctcctgtgcggcagcttgttctttaagctgttgtaactctttttccagctgacgcgtacgttccagtactgagcgcactttatcagccagattattgctatcgcctttcagcagatgcgcgacttcgcttaagcgatcgctgtctgcatgaacggtggcgatagcaccttctccggttaccgcttcgatacgacgaacgcctgcagcagtacccgattcagagatgatgcggaacagaccaatatcaccagtgcggctggcgtgagtaccgccacacaactcggtagagaaatcgcccatgctcagcacgcgtacgcgctcatcatacttctcgccgaacagcgccatcgcacctttcgctttcgccgcttcgagatccatgatgttggtttcgatcggcaaattgcgacgaatctgtgtgttcaccaggtcttcgaccgcacgaatctcttctggtttcatcgcttcgttgtgtgagaagtcgaagcgcagcaccttgtcgttaaccagtgaacctttctgcgatacatgagtacccagaacctggcgcagcgcagcgtgcatcaggtgcgttgcggagtgattcagacgaatacgggcgcgacgagcctcatcaacatcagcctgcaccgcgtcgcccactttcagagaacccgcagcaagtttaccgatgtgaccaatcgcctggccgtatttctgcgtatcttccaccgcaaaggagaagttagcgcctttcagttcgcctttatcgccaacctgaccgccggattccgcatagaatggcgtttgatccagcacgaccacagcttcctggcctgcattgatggcatcaaccgctttaccatcaacaaacagcgcagtcactttgccgttcagttccagatggtcatagcctttaaattcagatgcactgtcaacacggatcattgcgttgtaatcggcaccaaagccgctggcttcgcgcgcgcgacgacgctgctcttccattgcagcttcaaaaccagcttcgtcaactttgatgttgcgctcacgacaaacatcagccgtcaggtcaaccgggaagccataggtgtcgtacagacggaaagcagtttcaccatccagcgtatcaccagaaagttttgccagctcttcatccagcaacgccagaccgcgctccagagtacgagcaaactgctcttcttcagtcttcagcacctgctcaacctgcgcctgctggcgtttcaggtcttcacccgcagagcccataacgtcgatcagcggaccaaccagtttgtagaagaaggtttctttcgcgccgagcatattaccgtgacgcactgcgcgacgaatgatacgacgcagtacataaccacggttttcattggacggcattacgccatccgcgatcaggaacgcacaagaacgaatgtggtcagcgattacgcgcagcgatttattgctcagatcggttgcgccagtgactttcgctaccgcctggatcagcgtgcggaacaggtcgatgtcatagttagagttaacgtgttgcagcaccgcagcaatacgctccagacccataccggtatctacagacggcttcggcagcggttccatcgtgccatcggcctggcggttgaactgcatgaagacgatgttccagatctcaatgtagcggtcgccgtcttcttccgggcttcccggagggcccccccaaatgtggtcgccgtgatcgtagaagatttcggtgcacgggccgcacggaccagtgtcacccatctgccagaagttgtcagatgcgtatggcgcacctttgttatcgccgatgcgaataatacgttcgcgcgggatccctacttctttttcccagatttcgtaggcttcgtcgtcgctttcatagacggtaacccacagacgctctttcggcagggcaaaccatttttcgctggtcagcagttcccatgcaaactgaatggcatcgtgtttgaaatagtcgccgaagctgaagttgcccagcatttcgaagaaggtatggtgacgcgcggtgtaaccgacgttttccaggtcgttgtgtttaccacccgcacgcacgcagcgttgggaagtggtagcgcgggaataattacgcttgtcgagcccaaggaacacatccttgaactggttcatcccggcgttggtaaacaacaaagttgggtcgttatggggtaccagggagctgctggcaactacctgatgtcccttactatggaaaaagtcgagaaacgcctgacggatctcagcggtgctcttgctcataattatcctgaaatcaagctaacgaaatatcgccaccagctccagcgtgtcttaaccgccgggctggtaactgaaaagtgggaataagataagttttcttgactgggaagtaaaataccgtatgcgttcagtcggcaaaatttcgccaaatctcctggatatcttccatcagatagccacgatagagcagaaaacgctggatcttaactttttctgaaaagacagttggcaaaggttcgccatattttcgcgtcgcctgatcgcgcgccagtgcgcaccagtcgatgtcacattcacgcatcgctttttctgtcgcttcgcgggaaatacctttctgattcagttcctggcgaatacgcgcaggtccataacctttgcggctacggctggcgataaagcgcgcaacaaatcggctgtcatcgagatagccatgttcatggcaccaggcaataacgcgctcgtaatcttctgccgtagcatcaatctcttctgggccatttttgcccataatcggtgccgcgagtttacgtcgcagttcttgctcactgtgatcgcgcaccgccagaatgcgtaccgcacgatccaacaggcgagcatatgccgggcgacgggatgttgattctgtcatggcatatccttacaacttaaaaaagcaaaagggccgcagatgcgacccttgtgtatcaaacaagacgattaaaaatcttcgttagtttctgctacgccttcgctatcatctacagagaaatccggcgttgagttcgggttgctcagcagcaactcacgtactttcttctcgatctctttcgcggtttccgggttatctttcagccaggcagtcgcattcgctttaccctgaccgatcttctcacctttgtagctgtaccacgcgcctgctttctcgatcagcttctcttttacgcccaggtcaaccagttcgccgtagaagttgataccttcgccgtagaggatctggaattcagcctgtttaaacggcgcagcgattttgttcttcaccactttcacgcgggtttcgctacccaccacgttttcgccctctttcaccgcgccgatacgacggatgtcgagacgaacagaggcgtagaatttcagcgcgttaccaccggtagtggtttccgggttaccgaacatcacaccaattttcatacggatctggttgatgaagatcagcagcgtgttggactgcttcaggttacccgccagcttacgcatcgcctggctcatcatacgtgccgcaaggcccatgtgagagtcgccgatttcgccttcgatttccgctttcggcgtcagtgccgccacggagtcaacgacgataacgtctactgcgccagaacgcgccagggcgtcacagatttccagtgcctgctcgccggtgtccggctgggagcacagcaggttgtcgatatcgacgcccagtttacgtgcgtagattgggtccagcgcgtgttcagcatcgataaacgcacaggttttaccttcacgctgcgctgcggcgatcacctgcagcgtcagcgtggttttaccggaagattccggtccgtagatttcgacgatacggcccatcggcagaccacctgccccaagcgcgatatccagtgaaagcgaaccggtagagatggtttccacatccatggaacggtcttcacccaggcgcatgatggagcctttaccaaattgtttctcaatctggcccagtgctgccgccaacgctttctgtttgttttcgtcgatagccatttttactcctgtcatgccgggtaataccggatagtcaatatgttctgttgaagcaattatactgtatgctcatacagtatcaagtgttttgtagaaattgttgccacaaggtctgcaatgcatacgcagtagcctgacgacgcaccgcatcacggtcgccgctgaagcattcccgccgggtaatgccttcaccgcgggcagtggcaaaagcaaaccagacggtgccgacaggcttctcttcactgccgccatccggcccggcgataccactaatagacacggcataatcagcacgagccgctttcagtgcgcctatcgccatttccaccacgacgggttcactcaccgcgccatgctgcgccagcgtctcttcgcgtacgccgatcatctgcgctttggcttcgttactgtaggtgacaaatccgcgttcaaaccaggcggagctaccggcaatatcggtaatcactttcgctacccaaccaccggtacaagactcggcagttgttacggttgcgccacgggctttcagcgcctgcccaacctgttcacttaactgcatcagttcactgtcagtcatcacaacctctgtcagtcaaaaatttatgccggacaagatagcactttcgtcaggaagatggtgttggcgttgcaattttacgaggaggattcagaaaaaagctgattagccagagggaagctcacgcccccctcttgtaaatagctactgtactcgcgccagcgccacggcttgtcctaactgccagaccgccattgcgtaatgggtgctgtggttgtaacgggtgatggtgtagaagttcggcagaccgtaccagtactggtagccggtgccaacatccagacgcagcaggctggcttgttgatggttgcccagcggctgctgtggcgttaaacctgcggcggcaagctgcgaaatgctgtacttagttttgaagccatttggcaagcctggagcctgaccgtttgccattaccgcgacctgatcgcctttcacccagccgtgcgctttgaaatagttcgccacgctaccgatcgcatcaaccggatcccacaggttgatatgcccgtcgccgctgaaatctaccgcatattgtttgtaagacgacggcataaactgtccgtagcccatcgccccggcaaaggaacctttcagattgagcggatcgtcctgctcgtcgcgcgccatcaacaggaaggtttccagctcgccagagaaatactccgcgcggcgtgggtagttaaatgacagcgttgccagcgcatcgaggatgcgagttttccccatcacgcgcccccagcgggtttcaacgccgataatcccgacgataatttccggcggtactccatacacctgccacgcgcgattcaacgcatcttcatactgattccagaaaaccacaccgttctgcacgttgtccggcgtaataaattttttgcgataacggagccatgcgccgttcggacctgatggcggtttcaccgatgtggttggtgcctggttatccatcagccgcagtaccgaatccagacgcttcgcctgggagagaatttcctgcaactgctgacgatcgaaaccgtgtttgttcaccattttgtcgatgaactgctgggcattcgggttattagcgaaatcgccgcccatctgcatcacattgtgctgcggctcaagcaggaagccgccagacggcgttccggtggtcgtatcagtctcagtaggttttggcttgctgctacaggcggcaagcaacacaaaaaggggaagcaatgttacataacgacgcttgaacatgaggggtccatttaacagattcaaccaggggcaagtatggtaaagcatcacgccccgcacaaggaagcggtagtcactgcccgatacggactttacataactcaactcattcccctcgctatccttttattcaaactttcaaattaaaatatttatctttcattttgcgatcaaaataacacttttaaatctttcaatctgattagattaggttgccgtttggtaataaaacaataaatcctgaaggagagaacaatgatagaaaccattactcatggtgcagagtggtttatcgggctgttccaaaagggcggagaggtgtttaccgggatggtgaccggcattcttccgctgttgattagcctgctggttatcatgaacgcactgattaattttatcggtcagcatcgtattgaacgttttgctcaacgttgcgccggtaaccctgtttcccgttacctactgttaccgtgcattggcacgtttgtcttttgcaatccgatgaccctaagcctgggtcgctttatgccggaaaagtacaaacccagctactacgcggcggcctcttatagctgccactcaatgaatggcctcttcccccatatcaaccctggcgaactgtttgtttatcttggcattgccagcggtctgacaacgctgaacctgccacttggcccactggcggtgagttatctgctggttggtctggtcaccaatttcttccgcggctgggtgaccgatctgaccaccgccatttttgagaaaaagatgggcattcaacttgaacaaaaagttcacctggcaggagcaacatcatgacgcatattcggatcgaaaaaggaacgggtggctggggcggcccgcttgagctgaaagccacgccgggaaaaaaaatcgtctatatcaccgccggtacccggcctgcgattgttgacaaactggcacagcttactggctggcaggctattgacggatttaaagaaggtgaacccgcggaggcggaaattggtgtcgcggtaatcgactgtggcggcacattacgctgcggcatctatccgaaacgacgtattcccaccattaatatccactcgacgggcaagtccggtccgctggcgcagtacattgtggaagatatttatgtctctggcgtaaaagaagaaaacatcactgtagtaggtgatgcgacaccacaaccctcttccgtgggccgtgactatgacaccagtaagaaaatcaccgaacaaagcgatggtttactggcgaaggtgggaatgggcatggggtccaccgttgcggtgctgtttcaatctggtcgtgacaccatcgacactgtattaaaaaccattctgccgtttatggcattcgtctcggcgctcattggcatcattatggcttctggccttggtgactggattgcccacggtcttgctccgctggcgagccatccactgggtctggtcatgctggcgctcatctgttccttcccactgctttcacctttcctcggcccaggcgcagttatcgcacaggttatcggcgtattgattggcgtgcagattggtctcggcaatattccgccgcatctggctttaccggcactgtttgccatcaacgcgcaggcggcctgcgacttcatcccggtcggtttgtcgctggcggaagcccgtcaggacacggttcgcgtcggtgtcccttctgtactggtgagccgctttttaaccggcgcgccgactgtactgatcgcctggtttgtctccggttttatctatcaatagaggctgaaacatgaccgttatttatcagaccaccatcacccgtatcggcgcgagtgccattgacgccctcagtgaccagatgctcatcacctttcgtgaaggcgcgcctgcggacctcgaagagtattgcttcattcattgccacggcgagttgaaaggtgcactccatcccggtttgcaattttcactcgggcagcatcgctatccggtgaccgctgttggcagcgtggcggaagacaaccttcgcgaactgggtcatgtcaccctgcgcttcgatggtttaaacgaagcggaatttccgggcactgtccatgtggcaggccctgtccccgacgatatcgcgccgggatcggttttgaagtttgaatctgttaaggagtaaaaaatgaatcaggttgccgttgtcatcggtggtgggcaaaccttaggcgcgttcctgtgccacggtctggctgccgaggggtatcgcgtcgcggttgtcgatattcagagcgacaaagccgcaaatgtggcacaagaaattaacgccgaatatggtgaaagtatggcgtacggttttggtgctgacgccactagcgagcaaagcgttctggcgctctctcgtggggtagatgaaatctttggtcgcgtggatttgctggtctacagcgccggaatagcaaaagcagcctttatcagcgacttccagctcggcgattttgaccgttcgctacaggtgaatctggtgggttatttcctgtgtgcgcgtgaattttcgcgtttgatgatccgcgacgggattcaggggcgcattattcagatcaactcgaaatccggcaaagtgggcagcaaacacaactctggctacagcgcagcgaaatttggtggcgtcgggctgactcaatcactggcgctggatctggcggagtacggcattacggtgcattcactgatgctcggtaacctgctgaaatcgccgatgttccagtcactgttgccacaatacgcgaccaagctgggtatcaaaccggatcaagtcgagcagtattacatcgacaaagtaccgctcaaacgcggctgcgattatcaagatgtgctgaatatgctgctgttctacgccagtcctaaggcgtcgtactgcaccggacagtcgatcaatgtcaccggcggtcaggtgatgttctgatcaacagcggagatccattaaggatctccgtgagactatagaatgcctgatgcgctacgctcatcaggcatacaggacttccgccactacattaaggaaaagttatggtatccgcactcatcaccgtcgccgttatcgcctggtgtgcgcaactggccttaggcggctggcaaatttctcgttttaaccgtgccttcgacacactatgccagcaagggcgggttggcgtgggccgttccagcgggcgctttaaaccgcgggtcgtggtcgccatcgcgctggacgatcagcagcgcatcgtcgacaccttgtttatgaaaggactgaccgtcttcgcccgaccgcaaaaaattcccgcaattaccggtatgcatgcgggtgatttacagcccgatgtgatctttccccatgatccactatcacagaatgctctatcattggcgcttaaactgaaacgtggataatttcgttgtgaatgttacttgcttgcgaagttatcattttgaaacctaaatcaggtaatcacgcccatgaaacctcgtcagcgtcaggccgccattctggagtatctgcaaaagcagggtaaatgctcggttgaagaattggcgcaatactttgacaccacaggcacaaccattcgcaaagatctggtcattctggaacatgccggaaccgtcattcgtacttatggcggagtggtgttgaataaagaggaatccgatccgcctatcgatcataaaacactcatcaacacccacaagaaagagctgattgcagaagctgccgttagttttatccatgatggcgattcgatcattcttgatgctggcagtaccgttttgcagatggttcccctgctctcgcgctttaataacatcacggtgatgaccaacagcctgcatatcgtcaatgcgctatccgaactggataacgaacaaactatcctgatgccaggcggaacgtttcgcaaaaaatcggcctcatttcacgggcaactggcagagaatgccttcgagcatttcaccttcgataaattgtttatgggcaccgacggcatcgatctcaatgcgggcgtaaccacctttaacgaggtttataccgtcagtaaggcaatgtgcaatgccgcgcgcgaagtgattttgatggcggactcatcaaagtttggccgtaaaagccccaacgtagtttgcagtcttgaaagcgtcgataagctgattaccgacgcaggtatcgatccggcgtttcgtcaggcgctggaagagaaagggatcgatgtgatcataaccggagagagcaatgagtgaagcactactgaacgcgggacgtcagacgttaatgctggagttgcaggaagcaagccgtttaccggaacgtctgggcgatgattttgttcgcgccgccaatatcatcctgcactgtgaaggcaaagtggtggtttcgggaattggcaaatcgggccacattggtaagaaaatcgccgcaacgcttgccagtaccggcactccggctttttttgtccatccggcagaagcgctgcacggcgatctggggatgatcgaaagccgcgatgtgatgctgtttatctcttactccggtggcgcgaaggaactggatctgattattccgcgtctggaagataaatctatcgcgctgctggcgatgaccggcaaaccgacgtcaccgctgggcctggcggcaaaagcggtgctggatatctccgtagaacgcgaagcctgcccgatgcaccttgcgccgacctccagcaccgtcaataccctgatgatgggtgacgcgctggcgatggcggtcatgcaggcgcgcggatttaatgaagaagattttgcccgctcccacccagccggggcactgggcgctcgcttgctgaataaagtgcatcatctgatgcgccgtgacgatgccatcccacaggtggcgttaaccgccagcgtgatggatgcgatgctggaactcagccgcaccggtctggggctggtggcggtatgtgacgctcaacaacaggtacaaggcgtctttaccgacggcgatttacgtcgctggctggttggcggcggcgcactcaccacgccagtcaatgaagcgatgacggtcggcggcaccacgttgcaatcgcaaagtcgcgccatcgacgccaaagagatcctgatgaagcgcaaaatcactgccgcaccggtggtggatgaaaacggcaaactcaccggcgcaataaacctgcaggatttctatcaggccgggattatttaatccttcaatcccagacgtttcgccagccgatgcaggttggcgacgtcggtttccagcatccgcgcgcaggcagcccagttgtgatgattttgtgccagtgcctgacgaatagtttcacgctggaacgcttctgtcgcttcacgcaggttttgcttaacaacgggcaccgccgccacttctggcgtcggcaacgtcacctcaggaaaagcaaaatgttgcgcctcaagaatcacttcatcgccgctgcgggtggctctcgccagaactaccgcccgatgaatagcatgttccagttcgcgcacgtttcccggaaaactgtagtgttgcagtaaatttcgcgctccggcacttaataccacgcgggagagcccctgccgcaaacgacactgctcgcagaaataccccgccagcagaatgacatcatcgccccgctcacgcagcggcggcaccgaaagtggaaacacgctcaggcgatgaaacaaatcggcgcggaatcgccctgccagcacctcttcgcgtaaatcgcggttagtcgccgccagcacgcgcacatcgacccgcaaacaacggtcatcgccaacgcgctgaatatcgccatactgcaacaccctcagcagcttggcctgcaatgccaacgacaactcgccgatctcatccagaaacagcgtgccgttatccgccatttcaaacttcccgctgcgattactgatagcgccagtaaacgctcctttcacatgcccgaacaactcactttccgccacactttccggcagtgcagcacagttgagatagaccagcggattcaccgcccgtggcgaggcttcatgaatcgctttcgccaccagctccttaccggttccagtctcaccgctgatcaggacgttgagatcggacgccgccacaatctcaatctcttttttcagttgcgtcatgccaggggacaagccaatcatctgcgtctgtttcaccgcttcaaacggcgtggcatcgcctggcagcatattctggctttccagttgttcaatcagcaacgcattgcttaacgctcccgccgccagcgcagcaatcagccgtagctcttcgtcgctgaaaacatcgaactgatcgggctgcatcccgtcgagcgtcagtgcgccgatcaggttttgcccggcaaacaatggcagaccaacgcaggcgtgaaccttcagactctcctgcccaggaatcaaaccgtcatagggatcgggcaattcgctgtctgcgggaaagcgcaccacatccccggcgcgggcaatcgcttccagccgtggatgcccttccagcgcaaagcgtctaccgagtacatcctttgccagaccgtcgatggcaagcggaataaactgccgcgaatcgtaacgtagcaacgcagacgcatcgcactccagcacctgacgtagcgtggtgatcaggcgctgaaaacgatcctggtgaccaatcccacgctgcaattcgatggcgatattcgccagcacatcaacggaaaaactcatctttgcctcactgtcaatttgactatagatattgtcatatcgaccatttgattgatagtcattttgactactcattaatgggcataattttatttatagagtaaaaacaatcagataaaaaactggcacgcaatctgcaattagcaagacatctttttagaacacgctgaataaattgaggttgctatgtctattgtggtgaaaaataacattcattgggttggtcaacgtgactgggaagtgcgtgattttcacggcacggaatataaaacgctgcgcggcagcagctacaatagctacctcatccgcgaagaaaaaaacgtgctgatcgacaccgtcgaccataaattcagccgcgaatttgtgcagaacctgcgtaatgaaatcgatctggcggatatcgattacatcgtgattaaccatgcagaagaggaccacgctggggcgctgaccgaactgatggcacaaattcccgatacgccgatctactgtactgccaacgctatcgactcgataaatggtcatcaccatcatccggagtggaattttaatgtggtgaaaactggcgacacgctggatatcggcaacggcaaacagctcatttttgtcgaaacaccaatgctgcactggccggacagcatgatgacttacctgacaggcgacgcggtgctgttcagtaacgatgctttcggtcagcactactgcgacgagcatctgttcaacgatgaagtggatcagacggagcttttcgagcagtgccaacgttactacgccaatatcctgacgccgttcagccgcctggtaacgccgaaaattaccgagatcctgggctttaacttaccagtcgatatgatagccacttcccacggcgtggtatggcgcgataacccgacgcaaattgtcgagctgtacctgaaatgggcggctgattatcaggaagacagaatcaccattttctacgacaccatgtcgaataacacccgcatgatggctgacgctatcgcccagggaattgcggaaaccgacccacgcgtggcggtgaaaattttcaacgtcgcccgaagcgataaaaacgaaatcctgaccaatgtcttccgctcaaaaggcgtgctggtcggcacttcgacgatgaataacgtgatgatgccgaaaatcgccgggctggtggaggagatgaccggattacgcttccgtaacaaacgcgccagtgctttcggatctcacggctggagcggcggtgcggtggatcgtctttccacgcgcctgcaggatgcgggtttcgaaatgtcgctcagcctgaaagccaaatggcgaccagaccaggacgctctggagttatgccgtgaacacggtcgcgaaatcgcccgtcagtgggcgctcgcgccgctgccgcagagcacggtgaattcggtggttaaagaagaaacctctgccaccacgacggctgacctcggcccacggatgcagtgcagcgtctgccagtggatttacgatccggcaaaaggcgagccaatgcaggacgttgcgccaggaacgccgtggagtgaagttccggataacttcctctgcccggaatgctccctcggcaaagacgtctttgacgaactggcatcggaggcaaaatgagcaacggcattgtgatcattggttcgggcttcgccgcccgacaactggtgaaaaatattcgcaaacaggacgccactattccattaaccttgattgccgccgacagcatggatgagtacaacaaacctgacatcagccatgttatcagtcaggggcaacgtgccgatgaccttacccgccagacggcgggtgaatttgccgagcagtttaatctgcacctgtttccacaaacctgggtgacggatatcgatgccgaagcccgtgtggtgaaaagccagaataatcagtggcaatacgacaagctagtactggcaaccggtgccagtgcctttgtcccgcctgtgcctgggcgtgagttaatgctgacgttaaatagtcagcaagagtatcgcgcctgtgaaacgcaactgcgggatgcccgacgcgtgttgattgttggcggtggtttgattggtagcgaactggcgatggatttttgtcgtgcaggcaaagcggtcacgctaatcgacaacgctgccagtattctggcgtcgttaatgccaccggaagtaagcagccgcttgcagcatcggttgacggagatgggcgttcatctgctgttgaaatctcagttacaggggctggaaaaaacggattctggcattcaggcaacgctggaccgccagcgcaatatcgaagtggatgcggtaattgccgccaccggactgcgcccggaaaccgccctggcacgacgcgccgggctgacgattaatcgcggcgtttgcgtcgatagttatctgcaaaccagtaataccgatatttacgcgctgggcgattgcgcggaaattaacggtcaggtattgccgttcctccagccgattcaacttagcgcgatggtgctggcaaaaaatcttctcggcaataacacgccgctgaaactcccggcgatgctggtgaaaatcaaaacgccggaattaccgctgcatctggcaggcgaaacccagcgtcaggatttacgctggcaaattaataccgaacgccagggaatggtggcgcgcggcgttgacgatgctgaccagcttcgcgcctttgtggtcagtgaggatcggatgaaagaggcatttggattgttgaaaacattgccgatgtaggtgggctactgtgcctaaaatgtcggatgcgacgctggcgcgtcttatccgacctacggggacgcatgtgtaggccggataaggcgtttacgccgcatccggcaatggtgtccaaatgcaacacgttttatccgttctggacttcacccgctaaccaacgcgccgcagcaataaccccctgccccagagacaaaccgccatcacccgccggtaaactctgtggaaagagcaatgtgaaatcagcgagataatgcgccagacgtgcacgcagcaaacggttatgaataaccccgccgctaaataccagcgtagtgataccacgcatcgtggcctgctcacgcatcaacgcggcaaaaccctgcgccagcgcatcatgaaacgcccacgcgcgttgattaaccggtgcctgccagttcagccactgctgccagaaagtggcgagatccagttgattgtccacccgcggcattgtcaccggatgcgtcactccgtggcatgaggctgcgagcgcctccagagcacaagccgcttcaccttcataacttaacgtggctggcgcacagcccagtgccgccgccactgcatcgaaaaaacgcccacacgatgacgccagcggcgcgttaattccacgctcaatggcccgcgccagcacgctccagttttgctgttgcacactcgctgtttcgggataattctgccactccggcacaaagcgcaggcactgcgccagcaggtttcgccacggctgcttcgccgccaaatcgccaccagcaagcgccactgcaggcaagccgcccaggtgctcacattcgcgatagttcacccgcaggcactcgccgccccacaaagcgccattctcccccataccgataccgtcgagcgtcaaagcaatgacatcaccgccatccagcggccactgatgctctgccagacacgccgctgcgtgggcatgatgatgcagcaccgtttgcgtcggcagattcatttcgcgcgcccactggctggagacatagcccggatgtgcgtcatgcacaacgtattgcggggtgaaatcgtagatgttttgcatcaggcgtaacgcttcgcgccactgcatctggatgccatcgtcacttaaatcgcccagatgctgactcaacaccgcttgttcaccgcgcaccaggcagaaggtatttttcagatccgcaccgagacacagcacaggcggaacatttttaaagcccggaggcaaagccagcgcatccggcacatacccccgcgaacggcgcagcatttcgccgctttcgcgcaccaccgaatcatccatccgctgcacgatgtcgcggttatgtatcaaaaatccgtcggcaatgccctgcaaatccgccagcgcctgttcgttgctgatagctggtggtttaccgctcaggttgccggaggtcatcaccagcgggcattgcagttcctgtaacagcaaatgctggagcgggttcgcaggcaacattaccccgacttcgttaaggtcaggggcgatatcatcacaaagctcaggaacgtattttttatccaccagcacaatcggcgcggcgggcgtggtaagcaactggcgcgcagcgtctggtaaaccgtcagccactggcaacatgaccgccagcggtttcgccgggcgatgtttgcgcgcccgaagtgtcgccaccgcgttactgttacgtgcatcgcaggcaagatgaaatccgccaatccctttgatggcgacaattttgcccatttttaactgtgcgatagctgcctgtaatgccgcctcttgttccgcatgttcaccatgacttacccattcaagatgcgggccacactccgggcaggccaccggctgggcgtggaagcgacgatcgagcgggtcacggtactctttgtcacaggccggacatagcggaaacgccgccatcacggtaaacgggcggtcgtaaggcatggcgcgaataatggtgaaacgcgggccgcagtgggtacagttgataaacggataacgataacgccgttcgcctggggtattcatttcggcaaggcaagcagggcaagtagcggcatcgggaacaatttgcgtattcatggtgccgcctgtgctctggcgtatagtgaactcggtgggcagttgtgaccagataaacggctcacgctcgacgctatcaatacgcgccagcggcgggcagtgctgatacaattgaacaagaaacgtttccgggtcttcccgcagccggacttctacgccatcgccgtcattacagacatcgccgtgaagatttaattgctgtgccagctgccagacaaacggacgaaaaccgacgccctgcactttgccacgaatacgcagttggacaccgcaagatgtgttttttgccattgagttattcccgccatcatgaattgcgtaacccgccctgccggacacgacagcgtcgcatccggcagtcacaggtcggcgataccgcccgctccgtattctacgaatatttccgggaattcctttgatgccagaacagttctgtaagatttttagaacatcagcgccgtacggcggcgtttttctgcgctcagttgttcaagtttattacgatcgacacaaatcagcgcatgagtcgggcaagccgccatacacgccgggccgtcttcacgatggttgcacaggtcgcatttattggcttcggctttgtcagcccgtacattcagacccgcgccgctgttgcggatcaccggacgtaccaccacttccatcgcaccatacgggcaagccacaacgcaggttttgcaaccaatgcaacgttcctgcatcacatgaacaaaccctttatcacggctgatagcaccattcgggcagacgttagcgcacggtgcatcttcacactgacggcaaactgtcgccgtggaaatgttcacacctttaatgacatggatacgcggtaaaaaagtttccggggtcagcgatgcacagtcctgattttcctgatgagaaaccacgcacgctacttcacaggtacggcaaccaatacatttactcgcgtcagcaatgatgaaacggttcatcaaattctccagcaatgacagttaatgcgccgatacattcacaaatcatgccagtttttaatttactgttatttaaggaaattaatttctgtaatgcaggaaaaacgatgtcatcgacactagtgacgatgacatgtgatgacaatgtttatcgcgaaggagcaatgagtgagtcgcggcggatcagttttccgctgaaggttttcggcggtgagaaatccccgccatcgagcataaaaatcagccgtccaataatttcctgaatcatctcagtcaccggaatttttacgctggagagcgccggaacggtgtagggggcaatagcgatatcatcgaatccgataactgacacctgctctggcaccgctacgccgcgctcgtgtaacgctttcatcgcacctatcgccatatcgtcgttactggcaactaacgcgctaaatttagccccacgttcgagcaacatttctaccccttcggccccgctggcaggcgtccatttaccgttagcgataagtttttcattgagcgcaataccatgctgcgccagcgcgtctttatacccggcaagacgttcaatgctggtgggggaatccatcgagccggtaaggaaagcaatctcctgatgcccggcgtttatcaactctgccacggcgttaaaactggtctgtttatgatcgcaccagacgctatggctgctgtttttgcgcaggcggcgattaagcaccattatcggctgactgtgcgcgtcaatgatgtcatcgatctcatccacgcttaaaaaacgcgggtaaatcatgatcgcgtcgcagcgcagatccagcagatactgaatcgcctggcgctcttcttctgcgctgtgtttaccatctgccaatagcaactgccgccctttctcttccgccattcgcgcggcatgaaagagtaattcactaaaataaatgccgtggtaaagcgtgttggtcactaccagccccagcgtctgagtactcttcgccgacagattgcgcgccagcaagtttggacggtaaccgctctcttctaccgcctgaaacacgcgatctttagtctcctggctgacgtagccattacctgaaagcacgcgggaaacggtcgcttttgaaaccccggcgcgcttcgccacttccagcatcgtcgtcatcattttcatccctttacacgcaatcaacgcagtgtactgcaccgtttgccgattgtccttgcacaatcggcgggaaaaatattcaggtgaccggtttcacaaatataaaaaatgaacaattcactctcttgcttatttagtgacaactattcatgattttgtgaaaccggtttcttaattccgtttcagcatcggcatttttccgtcacgtcgactgataacaactacatctaccctactgataacaggataaaatccgatggccaaaaattatgcggcgctggcacgctcggtgatagcggcactgggcggcgttgataacatctcggcggtcacgcactgtatgacgcggttgcgctttgttatcaaagatgatgcacttatcgacagcccgacgttaaaaaccatccccggcgtgctcggcgtggtacgtagtgacaaccagtgtcaggtgattatcggcaataccgtttcacaagcctttcaggaagtcgtcagcctgctgccgggagatatgcagcccgcacagcccgtgggtaaacccaaactcacgctacgtcgcattggtgcggggatcctcgatgcgctgatcggcaccatgtcaccgctgatcccggcgattatcggcggatcgatggtcaaactgctggcaatgatcctcgagatgagcggcgtgctgacaaaaggatcgccgaccttaaccattctgaatgtgattggtgacggtgctttcttcttcctgccgctgatggtcgcggcatctgccgccatcaaatttaaaaccaatatgtcgctggcgattgccatcgcgggtgtgctggtacatccgagttttattgaactgatggcgaaagcggcccagggtgaacatgtcgaatttgccctgattccggtcaccgcggtgaaatacacctacacggtgatcccggcgctggtgatgacctggtgcctgtcatatatcgaacgctgggtggacagcattacaccggcggtgaccaaaaacttcctcaaaccaatgctgattgtgttgattgccgcaccgctggcaatcctgctgattggcccgattggtatctggatcggtagcgccatttcggcgctggtttacaccattcatggttatctgggctggctttcagtcgccattatgggcgcgctgtggcctctgctggtaatgaccgggatgcaccgcgtctttacgccaaccatcattcagaccattgccgaaaccggcaaagaagggatggtcatgccgtcagagatcggcgctaacctgtcgctgggcggttcatcactggcagtggcgtggaaaacgaaaaacccggaactgcgtcagacggcgctggctgcggcggcatcagccattatggcggggatttccgaaccggcgttatatggcgtggcgatccgcctgaaacgtccgcttatcgccagtcttatcagcggttttatttgcggcgcggttgccggtatggcggggcttgccagccactcaatggcagcgccggggctatttaccagcgtgcagttcttcgatccggcgaatccaatgagcatcgtctgggtgttcgcggtcatggcgctggcggtggtgctgtcgtttatcctcacactgttgctcggctttgaggatattcctgttgaggaagcggctgcccaggcgcgaaagtatcagagcgtacaaccgaccgtcgccaaagaagtaagtcttaattgaggatgaaaatgtcagtatttccagaaagttttttatggggcggcgcgcttgccgccaaccagtctgaaggtgcgttccgtgaaggtgacaaaggtctgaccactgtcgatatgatcccacacggcgagcatcgaatggcggtgaaactggggctggaaaaacgttttcagttgcgagatgacgagttttatcccagccatgaggcgacggatttttatcatcgttataaagaagatatcgccctgatggcagagatgggattcaaggttttccgtacctcaattgcctggagccgtctctttccgcagggcgatgaaatcacgcccaatcagcagggcattgctttttatcgttctgtctttgaagagtgtaaaaagtacggtatcgaaccgctggtcacgttgtgccacttcgatgtgccgatgcatctggtcaccgaatatggctcctggcgtaaccgcaagctggtggagtttttcagccgctacgccagaacctgctttgaagcatttgatggtctggtgaaatactggctaaccttcaatgaaatcaacattatgttgcatagcccgttctccggcgcgggtctggtgtttgaagaaggtgaaaatcaggatcaggtgaaatatcaggccgcgcatcaccagctggttgccagtgcgctagccaccaaaatcgcccatgaggttaacccgcaaaatcaggtgggctgtatgctagcgggcggtaacttctacccttacagttgcaagccggaagatgtctgggcggcgctggagaaagaccgggaaaacctgttttttatcgatgtgcaggcgcggggcacgtatccggcttactctgcccgcgtattccgcgaaaaaggggtaaccatcaacaaagcaccgggcgatgatgaaatcctgaaaaacaccgtcgattttgtctctttcagctattacgcctcgcgctgcgcctcggcggagatgaacgccaacaacagcagtgcggcgaacgtggtgaaatcgctgcgtaatccgtatctacaggtgagcgactggggctggggaattgatccactcggtctgcgtatcaccatgaatatgatgtacgatcgttatcagaagccgctgtttctggtggaaaacggcctgggcgcaaaagatgaatttgctgccaatggcgagattaacgacgactatcgcatcagctacttacgcgaacatatccgcgcaatgggcgaagcgattgcagacggcattccgctgatgggctacaccacatggggctgtattgatttagtttccgcctctacgggtgaaatgagcaaacgctacggctttgtctttgttgaccgtgacgacgcaggcaacggtacgctgacgcgcacgcgtaagaaatcattctggtggtataaaaaagtgattgccagtaatggggaagatttagagtaggtaacagtgccggatgcggcgtgaacgccttatccggcctacatgtcgcacgaaccatgaaggcccgataagcgcagcgcatcgggcaatttagcatttggcatcagagctggttcaccccatcaagaacatccctgtcctgattccttaatgaaaaactactcttcttccaccgctaactgcgcgaagccgccatttccttcccagccttccagtcgttgataaacggtttctaccgcatctttaatcggctgggtcatcgggtagtaaaagccgacgatatccggctgaatgccgaggaaaatcacttcgccaatatcttctttcaactggtcgataaggtaattcaacggcatgttatgggtagtcatcataaacatctcggcgatatcatccgggtcgatgatgcggatctcgccggggtttagccccatatccgtggcgtcgacaatcagcagtcgtgtcgggcgcagttcacggatagcgacgatgtcgttttccggtgcgctaccgccgtcaatcaccacccagttacctttcggcgcggcggcgcacttttccgccagcagcggacctgcgccatcatcgcccatcatgctattgccaacacagagtaaaacgtcagtcacgcagtctcctcaccatcaaatagatggcgttttcctgatgaatatcatgcagcatacttaacagcattgtactccattcctgctgctgcgaagtttgcgctgcccgggctttatcgaatgcgttggccagcatcggcacatggttaatgtcgatgacgatctcaccatatttcggcacgccttccattttgcggcgggcttcactgcctgcctccagagtggcaatccatgccagatattcatcccacgggcaggtgagcgccgcttccaggcaatcgataaccccaaggtggtgaccaatcgccaggctgtaatagaccacctgctgcgcctcggcgggcgtggcatcgttctcatcaataaatttacggctcagttgactgaacaccaccttttcactcatcggatacgcgcctcttcaacaacatgattcagatggctgacaatctcgttcagacgcggatcgttttccgcttccagccagcgtgcaacctgttcttcgccctgccctaactgtgtaaggtaatcatcggcaatctgacgaccgtaacgataacccgccaggcgacgtgcttcgcgatccactttcacgcgcagcggctgcaccatatcgccatgcaggatctccgccggttgttcatccagttcacccggcccacgggcgtgaattttctgctccagcaggccgagcgccattgcaaagccgtacagcgtggcggcaggcgttggcgggcagccagggatataaacatccacagggacaattttatccgtaccgccccacacgcagtagagatcgtggaagatcccgccgctgttaccgcaggcaccgtaggagatacaaattttcgggtccggcgcggactgccacgcacgcagcgcaggggatcgcattgcacgggtgaccgcgccggtaaacagtaaaatatccgcatgacgcggtgaaggaacgactttaatgccgaagcgttctgcatcaaacagcggcgataaagtggcgaaaatttcgatttcgcaaccgttgcagccgccgcagtccacgcggtaaacataggcagaacgtttgatttttttcagtaacgacgccttcatgctggcgatggattcatccaccgtcatggggaccggaatgccgttggcgtcacgggggcctaataaattgctcatcagatggcctctttcatatggcgagtcagttcaatacggtcggacggcaccaggcatttctggcgcttacattccgggcaagtctcaaagctttcgcggtggttttccgcgcggctgtcgccgttgtgcttaagcagcgcaatggcgtagtcgatctctttctggacggcgaaaggacgattgcagacgcggcagttgcacagcgcgaagcgggactgttgcaggaagtcttctttcttccacaccgccagttcgtactcttgcgacagtttgatcgccgccgtcgggcagacttcttcgcagcgtccacagaagatgcagcgcccaagattaaactcccaggcaagctctcctgtggcgaggtcagtttcaaccgttaaggcgtttgacgggcaggcattgacgcaggccgcgcagccgatgcactgctgcgggttctgctctggcttaccacggaagtttttatcaaccgcaatcggctccagcggataagacgaggtcgccgtgccggttttgatgacttttttgataaaggtaaacatggcgattccttatttcagcggcgagtttttacgctcaatgctgtaacgctcgagttctttgtacggcaccactttgctcttcttcttacgcacatcgaccacggtcatgcggtcggtacaggagtagcaagggtcgaggctaccgataatcagcggcgcatcggaaacggtgttgccgcgcagcatgtagcgcagggtcggccagttcgcgtaggtcgcggcacggcagcgccagcggtacagcttctggttgtcgccggtcatgctccagtggatatcatcgccgcgcggcgcttcggcaaagcccagcgcaaagcggtgcggaatgtaggtaaagccttccaccatcagtgggccacccggcaggttatccagaccgtagtcgatcatgttcagcgcggtatagacttcgttgatacgcactttcagacgggaaataacgtcgcagccctgctcgctgtggacttccattggcagcaggccatagccgacaaacgggtgatcggcgcgggtatcacgggcgtgaccgctggcacggaccatcgggccgacgttactgaagtcgcgagcgatttccgggtccagacgaccaatgccgacagtgcgctgttccatgttcggagtgctcagcagcacatccaccagctcctgcacttcacgacgcatctgttgtgccagctggcgggtctggatcatgtcgtctttcagcagatcgcgacgaatcccgccgatcaagttcaggccgtaggttttacgcgcaccggtaaggatctctgccattttcatggaggtttcacgcacgcggaagaactgcataaagccggagtcgaagccggtaaagtgacaggccaggccaaggttgagcagatgcgagtgcaagcgttctacctccagcagaatggcgcggatcatctgcgcacgttctggcacctgaatacccatcgcgttttccaccgacgtggtgtaggcggtgctgtgggcaaagccgcagatcccgcacacacggtcagagaggaaggtcacttcgttataacccatacgggtttccgccagtttttccatgccgcgatggacgtagaacagacggtagtcggcgtcgataatgttttcgccatcgacgaacagacggaagtggcccggttcatcagaagtgacgtgcagcggaccaatcggcacgacgttgtttttcttgtcgcccagttcgttgatgaactcgtaggtttcagcatcggtggtcggtgccggacgctgacgataatccatgctgtctttacgcagcggataaagttcatccggccagtcatccggcagcaccagacgacgttcatccggcagaccaaccggaatcaaaccgtacatatcgcgcacttcacgctcgccccacaccgccgccggaacgcgcggcgtcacggacggatattccggtttgttggcgtcaacttcgacgcgaaccgtaatccaacacttagtgcccttctccatcgacagcacgtagtaaacggcgtaatgaccattcagtttgcgttcgtcgttaccaaacagcaccgacagccagccaccctgtttgtagtaaagaaactccaccacttccggcaggtagttcacctttacggtgacagtcagctgatctttggtctgccaggcgtggtccagcacgacgcccggaaatgcctcattcagcgcggcgagataatgttgacctaatttttcttcagacatgctcaaactctctttaatcacgccgccagcaaggagacgaacgctaaaaatgcaaagccaaacccagcccaggtaatgcgcggagtaatatcaagacgcagacgggccatgctgttttcgaacagcgcgataaccaggacgccgaccaccagttttacgatggcaatcaccagcgccagcagcagtccaccggcggtgaaggtttccatttgtccccacggaataaacaccccgacgaacatctgcaacaccaccagctgtttcaggctgataccccatttcatgacgccaaagccgctgccgctgtattcagagagcgggccttcctgcagctcctgctcggcttccgccaggtcgaacggcagtttgcccatttcgataaaggtggcgaacgcacaggcacaaagcgccagtaccagcgggatgctctggctcagcggccagtgataaacggtgtcggtgatgttgctgatgttggtggaaccggcaacctgtgcggcaacccacagaccaagcagcagcatcggttcgaccagcacgccaagcatcgcttcacggctcgcgccgatagcggtaaacgggctaccggtatccagaccagaaatggcaaagaagaaacgcgcgatggcaaagagatacagtaaggtgatcaaatcacccagttgcggcagcggagaaccgacggtcaccaccggcagcgcagtagcgatagtcagcatgacgcccaccatcacatacggcgtcaggcggaacacccagccggaggcatccgggccaacgctctggcggcccagcagtttgaaaatgtcacgatactcctgcaacacacccggcccacgacggttatgcagacgggcgcgcgccacgcgggtaataccggagagcagcggcgcaacggcaaataacaccagcgcctgaattaacggatataaaacactcattctcaggctcctcgtgaaacaataatcaccaccagtaccgccagttcaaccagcgccatccggcggaacagcaacgcactaccttcgcactgccagcccggcaccagcgacaccggattcagccatttgcgcagtttcagcactggcgcaaacgcctgtttcaccggcatggcaaaaccgtgagcggtaatcaccattgatttttcgtggtcgtagccgcacacccaagccgcgccgcgggaacgcgatggcaaacgatcgcctttgcaaatcgccataatgatgaatggcagcagcgggcaggcaatcagcagcaacgtgatcatcggttgagaaacggtggtgttagcaggctccagcggcagaggtacagcagcagacagcatcggcagcagccacggcgcagcaacaccgccaattacgcagcaaatcgccagtgccactacgcttacgctcatcaggagcggtgcacaggtggcgttttcggcttctttggtacgcggcgcgccgaggaacgtgacgccatagactttcgccatacacatcaccgccagcgcaccggtaattgccagacccacggcgagcagcggccccagcagacgggcaacaaacgcgccactattgctcagtttgaagaaggattgatagataacccattccccggcaaaaccattcagcggcggcagcgcagccattgccatcagcccgactaacatggcgatggagataaccggcattttcttgccaataccaccgagtttttcgatatcgcgatgaccggtacggaaccagatgctccccgctccgaggaacagtacgcttttgaacaggctatggttaagcagatggtacagaccaccgaccaggccaagagcaatcagtgccggttgttcgagcgcgatacccgttacgccagcgcccagccccagcaggataatgccgatattttccagggtgtggtaagccagcaggcgctggatgttgtgttccatcaacgcatacagaccaccgacgaacgcggtgatcatgccgagcaccagcagcgcgatcccccaccacagcggtgcattaccgcccagcagtgacagggttaaaatgcccagcaggccaattttcatgactaccgtagaaaacaacgcggcagctggcgcagaggcgttagcatgtgcctgcggcacccagccgtgcagcggaataatcccggccagcaggccaaagccaatcacaccgagcagccagatatcggaaccgagcggcagctgttgcatacgcatatccagcaggcgcagatccagcgtgccataacgctgccacagcagccagcaagcaatcgccagcagcagagtgccaagacgccccagcgcaaaccacagtttgccctctttgctgttgctggtgaggaacaccgcgcacagggccatgatttcggccattaccacgaacatgccgaggttgctggcaatgacggcgcagacggcggcagccatcaacatattgatctgcaagccgttgcacttcacctgcgcgtggcgatgccagtcaatgttgtagaggctgacaaacagaccgcacagaccgagcgtaatcagccaaatcgcgttaagcggagaaatttgcacatcgtagcttaccagcgacagcgcaccgctcacgccaaccgcgccagtcagtaaagtgaagcccgcggctgccgtatacagactaccaaccgcgccgccaattccagctatccagccacttaacgctttttgaaaagaaaagagaaatgccagaacagcggcggcgacaaaccacgccacgccgctattgatcagggaaattgcgctcatttagcctctccactttgagcctgctgaaacaaggtgagatcgccaaagtccgtgttaaaagtcagctcacgcttacgtttgctgacgcgggcgatatcagtgttatccaccagatgcagggctttagtcgggcacatccgcacgcaggccggaccttgttcatcaaagctacaaaggtcacatttgacggcgatcgcgcgaatacctggcacccagtcaagcaatgtgctgacacgcgccggagcaggcggtgccggtggcgctttcggggtattggcgtttgccggaatatccagcggacggctgccggaaaattcaattgcgccaaacgggcaggcgatgccgcacagcttgcagcttacgcacaggctttcattcaactgcacggccccatcaacgcgggtgatggcgttaaccgggcagaccaccgcgcagggtgcatcttcacagtggtgacagagctgcggcgcagattctttttcattcagcatcactctcaggcgcggcattgattgcaggccgtgctggcgatgcgtctctgaacaggcggcctcacaagtgtggcagccgatacagagcgtggagtcagcaattacaaaacgattcaccaggcattcctcaggtgattgtcatttttgacgaaaacatgccgatgaaatgtcattttcgacactcatcgacacgcccatccccaaacaggcgtaacgcctgcaaaacgggcaaagcctcagctcatgctgccgggctttgtccctttaccagttggcttaaattcaccggcacattgttttcaatagcggtgtataagctgtcgtaaacgccagcgattttttcgagatagtgttccagaacctgttcgcgatcgcggatgttgaccttgccatcaatcatgccgtcaatgctcagttgcgcctgcgcaatccgctgtttgtcttcgccatcttttgtttcgacgtaatactcgatggtgtggctgttaaagccatccgccagggtgacgtaaatgcgaaaatgttcaaaaaggacgaaacagagttctttgtccggcgcgcagctcatggcgtgatgcaggcgcgctttcgataacgtgatcccctgaaccagcgaattgcagtagatgtgccactggtcctgtaggcgacgatgccgctgtgcgatgtaatcggctttctcgcttatttcccaaatagtcattgtcaggttacccgtttaacagagatgccagctttaagcattttttgtgccaacttttaatttattgttattaaagagatttttaagctaaagatgaatttcgtcgccgtgtcgacgtgtcatttcgacatcatcgacattattcaccgcagggataatcaacactggcacaattattgcttgtagctggcaatagttaatgggaggcgatatgcacgaaataaccctctgccaacgggcactggaattgatcgaacagcaggccgcaaaacacggcgcaaaacgcgtaactggggtctggctcaaaattggcgcattttcttgtgtcgaaaccagctctcttgccttttgttttgatctggtttgccgcggcagcgtggcggaaggttgtaaactgcacctcgaagaacaagaggccgaatgctggtgtgaaacatgccaacagtatgtgacgctactgacccagcgcgtccgccgctgtccacagtgtcatggtgacatgctgcagattgtggcagacgacggtttacagattcggcggatagaaatagaccaggagtgagcgatgtgtacaacatgcggttgcggtgaaggcaacctgtatatcgagggtgatgaacataaccctcattccgcgtttcgtagcgcgccatttgccccggcggcacgcccgaagatgaaaatcaccggcattaaagcgcctgaatttacccccagccagactgaagaaggcgacctgcattacggtcatggcgaagcgggcactcacgcaccgggcatgagccagcgtcggatgctggaagtcgaaattgacgtgctggacaaaaataaccgtctggctgaacgcaaccgcgcgcgctttgctgcccgcaagcaactggtgctcaacctggtttccagccctggttccggtaaaaccaccctgctgacggaaaccctaatgcgcctgaaagacagcgttccgtgcgcagttattgaaggcgaccagcaaaccgtgaacgatgccgcacgcattcgcgctaccggcacaccagcgattcaggtgaataccggtaaaggctgccatcttgacgcacagatgattgccgacgccgcaccgcgcctgccactggacgataacggtattctgtttatcgaaaacgttggcaacctcgtatgcccggccagcttcgatctcggtgaaaaacacaaagtggcggtgctttccgttaccgaaggtgaagacaaaccgctgaaatatccgcatatgtttgccgccgcctcgctgatgctgctcaacaaagttgacctgctgccgtatctcaactttgacgttgagaagtgcatcgcctgcgcccgcgaagtcaatccagaaattgaaatcatccttatttccgccaccagcggcgaagggatggaccagtggctgaactggctggagacacagcgatgtgcataggcgttcccggccagatccgcaccattgacggcaaccaggcgaaagtcgacgtctgcggcattcagcgcgatgtcgatttaacgttagtcggcagctgcgatgaaaacggtcagccgcgcgtgggccagtgggtactggtacacgttggctttgccatgagcgtaattaatgaagccgaagcacgcgacactctcgacgccttacaaaacatgtttgacgttgagccggatgtcggcgcgctgttgtatggcgaggaaaaataatgcgttttgttgatgaatatcgcgcgccggaacaggtgatgcagttaattgagcatctgcgcgaacgtgcttcacatctctcttacacagccgaacgccctctgcggattatggaagtgtgcggtggtcatacccacgccatttttaaattcggcctcgaccagttactgcctgaaaacgttgagtttatccacggtccgggttgcccggtgtgcgtactgccgatgggtagaatcgacacctgcgtggagattgccagccatccggaagtcatcttctgtacctttggcgacgccatgcgcgtgccggggaaacagggatcgctgttgcaggcaaaagcacgcggtgccgatgttcgcatcgtttactcgccaatggatgcgttgaaactggcgcaggagaatccaacccgcaaagtggtgttcttcggcttaggttttgaaaccaccatgccgaccaccgccatcactctgcaacaggcgaaagcccgcgatgtgcagaatttttacttcttctgccagcatattacgcttatcccgacgctgcgcagtttgctggaacagccggataacggtatcgacgcgttcctcgcgccgggccacgttagtatggttatcggcactgatgcctataattttatcgccagcgattttcatcgtccgctggtggtcgctggtttcgaaccccttgatctactgcaaggcgtggtgatgctggtggagcagaaaatagcggcccacagcaaggtagagaatcagtatcgtcgggtggtaccggatgccggtaacctgctggcgcaacaggcaattgctgatgtgttctgtgtcaacggcgacagcgaatggcgcggcttaggcgtgattgaatcttctggcgtgcacctgacgccggattatcaacgattcgatgccgaagcacatttccgcccggcaccgcagcaggtctgcgatgacccgcgcgcacgttgtggtgaagtattaacgggcaaatgtaagccgcatcaatgcccgctgtttggtaacacctgtaatcctcaaaccgcatttggtgcactgatggtctcctccgaaggagcgtgcgccgcgtggtatcagtatcgtcagcaggagaatgaagcgtgaataatatccaactcgcccacggcagcggcggccaggcgatgcagcaattaatcaacagcctgtttatggaagcctttgccaacccgtggctggcagagcaggaagaccaggcacgtcttgatctggcgcagctggtagcagaaggcgatcgtctggcgttctccaccgacagttacgtcattgacccgctgttctttcctggcggtaatatcggcaagctggcgatttgcggcaccgcgaatgacgttgcggtcagtggcgctattccgcgctatctctcctgtggctttatcctcgaagaaggattgccgatggagacactgaaagccgtagtgaccagcatggcagaaaccgcccgcacggcaggcattgccatcgttactggcgatactaaagtggtgcagcgcggcgcggtagataaactgtttatcaacaccgctggcatgggcgcaattccggcgaatattcactggggcgcacagacgctaaccgcaggcgatgtattgctggtgagcggtacactcggcgaccacggggcgactatccttaacctgcgtgagcagctggggctggatggcgaactggtcagcgactgcgcggtgctgacgccgcttattcagacgctgcgtgacattcccggcgtgaaagcgctgcgtgatgccacccgtggtggtgtaaacgcggtggttcatgagttcgcggcagcctgcggttgtggtattgaactttcagaagcggcactgcctgttaaacctgccgtgcgtggcgtttgcgaattgctgggactggacgccctgaactttgccaacgaaggcaaactagtaatagctgttgaacgcaacgcggcagagcaagtgctggcagcgttacattcccatccactggggaaagacgcggcgctgattggtgaagtggtggaacgtaaaggtgttcgtcttgccggtctgtatggcgtgaaacgaaccctcgatttaccacacgccgaaccgcttccgcgtatatgctaataaaattctaaatctcctatagttagtcaatgaccttttgcaccgctttgcggtgctttcctggaagaacaaaatgtcatatacaccgatgagtgatctcggacaacaagggttgttcgacatcactcggacactattgcagcagcccgatctggcctcgctgtgtgaggctctttcgcaactggtaaagcgttctgcgctcgccgacaacgcggctattgtgttgtggcaagcgcagactcaacgtgcgtcttattacgcgtcgcgtgaaaaagacacccccattaaatatgaagacgaaactgttctggcacacggtccggtacgcagcattttgtcgcgccctgatacgctgcattgcagttacgaagaattttgtgaaacctggccgcagctggccgcaggtgggctatacccaaaatttggtcactattgcctgatgccactggcggcggaagggcatatttttggtggctgtgaatttattcgttatgacgatcgcccctggagcgaaaaagagttcaatcgtctgcaaacatttacgcagatcgtttcagtcgtcaccgaacaaatccagagccgcgtcgttaacaatgtcgactatgagttgttatgccgggaacgcgataacttccgcatcctggtcgccatcaccaacgcggtgctttcccgcctggatatggacgaactggtcagcgaagtcgccaaagaaatccattactatttcgacattgacgatatcagtatcgtcttacgcagccaccgtaaaaacaaactcaacatctactccactcactatcttgataaacagcatcccgcccacgaacagagcgaagtcgatgaagccggaaccctcaccgaacgcgtgttcaaaagtaaagagatgctgctgatcaatctccacgagcgggacgatttagccccctatgaacgcatgttgttcgacacctggggcaaccagattcaaaccttgtgcctgttaccgctgatgtctggcgacaccatgctgggcgtgctgaaactggcgcaatgcgaagagaaagtgtttaccactaccaatctgaatttactgcgccagattgccgaacgtgtggcaatcgctgtcgataacgccctcgcctatcaggaaatccatcgtctgaaagaacggctggttgatgaaaacctcgccctgaccgagcagctcaacaatgttgatagtgaatttggcgagattattggccgcagcgaagccatgtacagcgtgcttaaacaagttgaaatggtggcgcaaagtgacagtaccgtgctgatcctcggtgaaactggcacgggtaaagagctgattgcccgtgcgatccataatctcagtgggcgtaataatcgccgcatggtcaaaatgaactgcgcggcgatgcctgccggattgctggaaagcgatctgtttggtcatgagcgtggggcttttaccggtgccagcgcccagcgtatcggtcgttttgaactggcggataaaagctccctgttcctcgacgaagtgggcgatatgccactggagttacagccgaagttgctgcgtgtattgcaggaacaggagtttgaacgtctcggcagcaacaaaatcattcagacggacgtgcgtctaatcgccgcgactaaccgcgatctgaaaaaaatggtcgccgaccgtgagttccgtagcgatctctattaccgcctgaacgtattcccgattcacctgccgccactacgcgagcgtccggaagatattccgctgctggcgaaagcctttaccttcaaaattgcccgtcgtctggggcgcaatatcgacagcattcctgccgagacgctgcgcaccttgagcaacatggagtggccgggtaacgtacgcgaactggaaaacgtcattgagcgcgcggtattgctaacacgcggtaacgtgctgcagctgtcattgccagatattgttttaccggaacctgaaacgccgcctgccgcaacggttgtcgcccaggagggcgaagatgaatatcagttgattgtgcgcgtgctgaaagaaaccaacggcgtggttgccgggcctaaaggcgctgcgcaacgtctggggctgaaacgcacgaccctgctgtcacggatgaagcggctgggaattgataaatcggcattgatttaactgcaaattgccggacagatctgcctgtccggcatactattcatgaggttttttcggacgatatttttccggcagttctggcaccggacgcttgtcatcgatgagatgacgcacggttaagatcggatgacgccacagcattctcggcccggcccaacgcataatctgtttcatctcttcacgctttgcaggctggtaacagtgcaccggacactgcttacaggctggtttctcttcgccgaacacacatttatccagccgcttttgcgcgtaaacaaacaacgcctcgtaatgctccggctccgctgacgcctgcgggcatttcgcttgataaagatcgatcatttttttaatcgtcagtttttcacgagagatacgcttgccggacatgctgcctccacctcattaagatgtatttatattacatcttaatcttaaagggcactatgactctaaagaagaagggttcgccaaccgacgcaattttgcgtacttgcttcataagcatcacgcaaaagctgcaaaacagcatctttcccggaaccagcatcaagaactcgccgttcgcttcttcccctgaaatgattaactccggtatcatgtgcgccttatgtgattacaacgaaaataaaaaccatcacaccccatttaatatcagggaaccggacataaccccatgagtgcaatagaaaatttcgacgcccatacgcccatgatgcagcagtatctcaagctgaaagcccagcatcccgagatcctgctgttttaccggatgggtgatttttatgaactgttttatgacgacgcaaaacgcgcgtcgcaactgctggatatctcactgaccaaacgcggcgcttcagcgggagagccgatcccgatggcggggatcccctaccatgcggtggaaaactacctcgccaaactggtgaatcagggcgagtccgttgccatctgcgaacaaattggcgatccggcgaccagcaaaggtccggttgagcgcaaagttgtgcgtatcgttacgccaggcaccatcagcgatgaagccctgttgcaggagcgtcaggacaacctgctggcggctatctggcaggacagcaaaggtttcggctacgcgacgctggatatcagttccgggcgttttcgcctgagcgaaccggctgaccgggaaacgatggcggcagaactgcaacgcactaatcctgcggaactgctgtatgcagaagattttgctgaaatgtcgttaattgaaggccgtcgcggcctgcgccgtcgcccgctgtgggagtttgaaatcgacaccgcgcgccagcagttgaatctgcaatttgggacccgcgatctggtcggttttggcgtcgagaacgcgccgcgcggactttgtgctgccggttgtctgttgcagtatgcgaaagatacccaacgtacgactctgccgcatattcgttccatcaccatggaacgtgagcaggacagcatcattatggatgccgcgacacgtcgtaacctggaaattactcagaacctggcgggcggtgcggaaaatacgctggcttctgtgctcgactgcaccgtcacgccgatgggtagtcgtatgctgaaacgctggctgcatatgccagtgcgcgatacccgcgtgttgcttgagcgccagcaaactattggcgcattgcaggatttcaccgccgagttgcagccggtactgcgtcaggtcggcgacctggaacgtattctggcacgtctggctttacgaactgctcgcccacgcgatctggcccgtatgcgccacgctttccagcaactgccggagctgcgtgcgcagttagaaactgtcgatagtgcaccggtacaggcgctacgcgagaagatgggcgagtttgccgagctgcgcgatctgctggagcgagcaatcatcgacacaccgccggtgctggtacgcgacggtggtgttatcgcatcgggctataacgaagagctggatgagtggcgcgcgctggctgacggcgcgaccgattatctggagcgtctggaagtccgcgagcgtgaacgtaccggcctggacacgctgaaagttggctttaatgcggtgcacggctactacattcaaatcagccgtgggcaaagccatctggcacccatcaactacatgcgtcgccagacgctgaaaaacgccgagcgctacatcattccagagctaaaagagtacgaagataaagttctcacctcaaaaggcaaagcactggcactggaaaaacagctttatgaagagttgttcgacctgctgttgccgcatctggaagcgttgcaacagagcgcgagcgcgctggcggaactcgacgtgctggtgaacctggcggaacgcgcctataccctgaactacacctgcccgaccttcattgataaaccgggcatacgcattaccgaaggtcgccatccggtagttgaacaagtactgaatgagccatttatcgccaacccgctgaatctgtcgccgcagcgccgcatgttgatcatcaccggtccgaacatgggcggtaaaagtacctatatgcgccagaccgcactgattgcgctgatggcctacatcggcagctatgtaccggcacaaaaagtcgagattggacctatcgatcgcatctttacccgcgtaggcgcggcagatgacctggcgtccgggcgctcaacctttatggtggagatgaccgaaaccgccaatattttacataacgccaccgagtacagtctggtattgatggatgagatcgggcgtggaacgtccacttacgatggtctgtcgctggcgtgggcgtgcgcagaaaatctggcgaataagattaaggcattgacgctgtttgctacccactatttcgagctgacccagttaccggagaaaatggaaggcgtcgctaacgtgcatctcgatgcactggagcacggcgacaccattgcctttatgcacagcgtgcaggatggcgcggcgagcaaaagctacggcctggcggttgcagctctggcaggcgtgccaaaagaggttattaagcgcgcacggcaaaagctgcgtgagctggaaagcatttcgccgaacgccgccgctacgcaagtggatggtacgcaaatgtctttgctgtcagtaccagaagaaacttcgcctgcggtcgaagctctggaaaatcttgatccggattcactcaccccgcgtcaggcgctggagtggatttatcgcttgaagagcctggtgtaataacaattcccgatagtcttttgctatcgggaatattaacgacaactgacgaataaaataaaaacaccctgtataataggaaagcttattttacagggtaaaaccatgccatctacacgctatcaaaaaatcaatgcccatcactatcgccatatatgggtcgttggtgatattcatggtgaatatcagttattacaatcccgcttacatcaactctcttttttccccgaaatcgacttacttatttctgtcggcgataatattgatcgtggaccggagagtcttgacgtcctgcgcctgctaaaccaaccctggtttacgtcggttaaaggcaaccacgaagcgatggcgcttgaggcattcgaaactggcgatggcaatatgtggcttgccagcggtggtgactggtttttcgatttaaatgattcagagcaacaagaggcaatagatctgttgctgaaattccatcaccttccacatattattgaaatcactaacgacaacataaaatatgccatcgcacatgcagattatccggggagtgaatatctctttggtaaagaaatagcggagagcgaattactctggcctgttgatcgtgtgcagaaatcgcttaatggcgagttacaacaaataaacggcgctgattattttatatttggacatatgatgtttgataacattcagacgttcgctaaccagatttatattgataccggatcgccgaacagcgggcggctgtcattttataaaataaagtagtctcatgcttcttctgtgaagcatgagtaacccggtgttattgcaggccattattcatttttcgctaccagcaaagagagatcctgcttcaccagcgcgcgactggcactctccggcaaaccgtcgtctgtaataatctgatcaaactcgcttaatggtaacgccagccatgtcgccacctgaccatatttcgtcgcatcacagaccaaaactcgctggcggctggcactggcaatcgcccgtttcaccgtgactttatcttccgctggcgtagaaatcccccgcacactccatgacgatgcagaaataaaagcctgatcaatcatcaggctgcgcagcatggtcgcagcggcttccccgacacaggaacggttttcccgacacactgcaccgccagtgtgaataattgtgcaattactgttgtcgagcaagtagtccgcaataacgaaatcgtttgtgaccacagtcagtgactccatgtgaatcagatgctgtgctatcgctaacgtggtcgttcccgcatccagatagatacaacttcccggctgaacaagacttgccgccagcttgccaatagccgctttttgcgtcattgccagcgcagtttttacctgatgagaaggttcatgcgccacgcgtcccggagactggacgcctccggacaccagcacaacggctccctgctgctccagtttttgtaaatcccgacgaatggtcatatgtgacacattcattctgtccgttagttcagcaatactgacaatgcctttttcagctaccatctcaaggatgatttggcgacgctctacgggtatcaacttttgctccttcctttgtcctgctgacattctacgctatttgcctgcgaaacgtgcgcggcgcaactaacgcttagttcacataaaataacacacaatgttaatttatgtgaatcagatcaccatatcgttatcttccagcgcttatattcacaatatcaaacaaaatatcacttaaattaacaaggagagcagatgaaaacgggatctgagtttcatgtcggtatcgttggcttagggtcaatgggaatgggagcagcactgtcatgtgtccgcgcaggtctttctacctggggcgcagacctgaacagcaatgcctgcgctacgttgaaagaggcaggtgcttgcggggtttctgataacgccgcgacgtttgccgaaaaactggacgcactgctggtgctggtggtcaatgcggcccaggttaaacaggtgctgtttggtgaaacaggcgttgcacaacatctgaaacccggtacggcagtaatggtttcttccactatcgctagtgctgatgcgcaagaaattgctaccgctctggctggattcgatctggaaatgctggatgcgccagtttctggtggtgcagtaaaagccgctaacggtgaaatgactgtcatggcctccggtagcgatattgcctttgaacgactggcacccgtgctggaagccgttgccggaaaagtttatcgcataggtgcagaaccgggactaggttcgaccgtaaaaattattcaccagttgttagcgggcgtacatattgctgccggagccgaagcgatggcacttgcagcccgtgcggggatcccgctggatgtgatgtatgacgtcgtgaccaatgccgccggaaattcctggatgttcgaaaaccggatgcgtcatgtggtggatggcgattacaccccgcattcagccgtcgatatttttgttaaggatcttggtctggttgccgatacagccaaagccctgcacttcccgctgccattggcctcaacagcattgaatatgttcaccagcgccagtaacgcgggttacgggaaagaagacgatagcgcagttatcaagattttctctggcatcactctaccgggagcgaaatcatgatcaagattggcgttatcgccgatgattttaccggcgcgacggatatcgccagttttctggtggaaaacggtctaccaacggtacaaattaacggtgttccaacaggtaaaatgccggaagcaatcgacgcactggtgatcagcctgaaaacgcgctcctgtccagtggttgaagccacacagcaatcgctggcggctctgagctggttgcaacagcaaggttgcaaacagatctatttcaaatactgctctactttcgacagtacggcgaaaggtaatattggcccggttaccgatgccttaatggatgctctcgacacgccgtttacggtcttctctccggccctgccggtcaacggacgtacggtttatcaggggtatttgttcgtaatgaatcaactgctggccgaatccgggatgcgccatcacccggtaaatcccatgaccgacagctatcttccccgtctggttgaagcgcaatccacagggcgctgcggcgtcgtttcggcacatgttttcgaacaaggtgtggatgccgttcgtcaagagctggctcgcttacagcaagagggctaccgctacgcggtgcttgatgcgctgaccgaacaccatctggaaattcagggagaagccttgcgcgatgccccactggtaacgggcggttctggtctggcgattggcctggcccggcagtgggcgcaagaaaacggtaaccaggctcgcaaagcagggcgtccgctcgctgggcgcggcgtagtgctctccggttcatgctctcaaatgaccaaccgccaggtagcacattaccgtcaaattgcaccagcccgtgaagttgatgtggcacgctgcctctcaattgaaactctggccgcttatgcacacgaactggcagagtgggttctgggccaggaaagtgtacttgctccactggtttttgccaccgccagcactgacgcattggcagcaattcaacagcaatacggtgcacaaaaagccagtcaggcagtagaaacactgttttctcaactagcggcgcggttagcagcggaaggcgtgacacgctttattgtcgcaggcggtgagacctccggcgtagtcacacagagcctgggaataaaagggtttcatattggcccaaccatttcccccggcgtgccgtgggtaaacgcactggataagcctgtctcactcgcccttaaatctggcaacttcggtgatgacgcctttttttcacgagcccaaagagagtttttatcatgagcgatttcgcaaaagtagagcagtctttgcgagaggagatgacgcggattgccagttcattctttcagcgcggctatgcaaccggttcggctggcaatctgtcgctgcttttacctgacgggaatttactggcgacaccgacaggttcatgcctgggcaatctcgatccgcagcggctttccaaagtcgccgcggatggcgaatggttaagtggtgacaaaccctcgaaagaggtgctctttcatctggcgctgtatcgcaacaatccgcgctgtaaagcggtggtgcatttgcacagcacatggtcgacggcgctttcctgcctgcaagggctggacagcagcaacgttattcgtccgttcacaccatacgtggtgatgcggatgggaaatgtcccgctggtgccttattaccgaccgggcgataaacgcatcgcacaggatctggcggaactggcagcagacaatcaggcttttttactggcaaatcatggcccagtggtttgcggtgaaagcctgcaagaagccgccaacaatatggaagagctggaggaaacggcaaagctgatttttattctcggtgaccgcccgatccgttatctgaccgcaggtgaaattgcggaattaaggagttaatgcaatgcctcgttttgcagctaatttatccatgatgttcaccgaagtgccttttattgaacgcttcgccgcagcgcgaaaagccgggttcgatgctgtggaatttctgtttccctataactactccaccctgcaaatccaaaagcaactggagcaaaaccatctgacactggcgctgttcaataccgctcccggagatattaatgcgggggaatggggattatccgcccttcccggacgtgagcacgaagcacacgcagacatcgacctggcactggaatatgcattggcgctcaattgtgaacaagtccatgtgatggcaggcgtcgtgcccgctggcgaagatgctgaacggtaccgggcagtatttatcgataatatccgctacgctgccgaccgctttgcgccacacggcaagcgaatattagttgaagcactcagccccggcgttaagcctcattatctcttctccagccagtatcaggcactggctattgttgaagaggttgcgcgagataacgtgtttattcaactagatacttttcatgcgcaaaaagtagatggcaacctgacgcatttaatccgcgactacgccgggaaatatgcgcacgtacaaattgccggactacctgatcgacatgaaccggacgatggagaaatcaactatccgtggctgttccgcctgttcgatgaggtgggatatcagggctggatcggttgtgaatataaacctcgtggcctcaccgaagaaaggcttggctggtttgacgcctggcgctaattcgttaaatccctaattacaacgtacccatacatccccccatctacggatggggtaggttaactataactttcagacagggtttcccatgtccacaattacattgttatgcattgcgttagctggcgtaatcatgctgttgctgctggtcatcaaggcaaaggtacaaccattcgttgctttgctcctcgtcagcctgttagtcgcacttgcggcaggtataccggcgggcgaagtgggtaaagtgatgatcgccgggatgggcggtgtgcttggttccgtcactattattattggtctgggcgctatgctggggcgtatgatcgaacactctggtggtgcagagtcactggctaattatttcagtcgcaagttaggtgacaaacgaactatcgctgcgctgactctggcagcgttcttcctcggtattcccgtcttctttgatgtcggctttattattcttgcgccaatcatttacggttttgccaaggttgccaaaatatcgccactcaaatttggcctgcctgtcgctgggatcatgctcactgttcacgtggcggtaccgccgcatccaggccctgtcgccgcagcggggttactccacgcagacatcggctggctaaccatcatcggtattgcgatttctattcccgtaggggttgttggctactttgcagcgaaaataatcaataagcgccaatatgcgatgtcagtagaagtactggaacagatgcaactggctccggccagtgaggaaggcgcgacaaaattaagcgataaaataaatccaccgggcgtcgcgctggtcacctcgctaattgttattcctatcgcgattatcatggcgggtacggtttccgcaacactgatgccgccttcgcatcccctgcttggtacgctacagctgatcggctcaccaatggtagctctaatgattgcgctggtgctggcattctggttattggctttacgtcgcggctggagcttacaacacaccagcgacattatgggctcagcgcttcctactgcggcggtagtgattttggttactggtgctggaggggtatttggcaaagtgctggtggaatcgggcgtcggcaaagcccttgccaacatgctacaaatgattgacctgcctctgttaccagccgcatttattatttcactggcgctgcgtgcatcgcaggggtcagcaaccgtagcaatactgacaaccggcgggttactctcagaagcggtgatgggattgaatccgattcagtgcgtattggtgacgctggcagcctgctttggtgggcttggtgcgtcacatattaatgactcagggttctggattgtgaccaaatatctggggttgtcggtagcagacggtctgaaaacctggacagtgttaacgaccattctcggttttaccggattcttaattacctggtgcgtatgggcggtaatttgaccttaataaaaaggtccgatgggcatcggaccttttattgtgcacagaaaaggccagcctcgcttgagactggcctttctgacagatgcttacttactcgcggaacagcgcttcgatattcagcccctgcgtttgcaggatttcgcgcaaacggcgcaggccttcaacctgaatctggcgaacacgttcacgggtgaggccaatttcacgacctacatcttccagtgttgccgcttcgtaccccagcaaaccgaatcgacgtgccagcacttcacgctgtttggcgttcagctcgaacagccatttgacgatactctgcttcatatcgtcatcttgcgtggtatcttccggaccgttctctttttcatcggccaggatgtccagcaacgctttttcggaatcaccacccagcggggtgtctaccgaggtaatgcgctcgttaagacgaagcatacggctgacgtcatcaactggcttatccagttgctctgcgatctcttccgcacttggttcatggtccagcttatgggacaactcacgtgcggttcgcaggtaaacgttcagctcctttacgatgtgaatcggcaaacgaatagtacgggtttggttcataatcgcccgttcaatcgtctggcgaatccaccaggttgcgtatgttgagaagcggaaaccacgttccgggtcaaacttctctaccgcgcggatcagccccaggttgccctcttcgataaggtccagcaacgccagaccacgattgccataacggcgggcaatttttaccaccagacgcaagttactctcgatcatccggcggcgagaggcgacatctccacgcagtgcgcgacgcgcaaaataaacttcttcttcggccgttaacagtggtgaataaccaatctcaccaaggtaaagctgagtcgcgtccaacacacgctgtgtggctccctgcgataacagttcctcttcggccaaatcgttatcactgggttcctcttctactaaggccttttcgtcaaaaacctcaactccgttctcatcaaattccgcatcttcatttaaatcatgaactttcagcgtattctgactcataaggtggctcctacccgtgatcccttgacggaacattcaagcaaaagcctggttccgccgatttatcgctgcggcaaataacgcagcgggtttacggatttccccttgtaacgaatttcaaaatgcaagcgtgttgaactggttccggtgctacccatggtcgctattttttgccccgccttaacttcttgttgttcccggaccagcattgtgtcgttatgggcgtaggcactcaggtaatcatcattatgtttgatgataatcagattaccgtagccgcgcagcgcgttaccagcataaacaacgcggccatctgcggtcgcgataattgcctgtcctttgctgcctgcgatatcaatccccttgttgcccccctcagaagcgccaaaggtttcgatcactttgccctcagtcggccagcgccaggtggagataggcgtactggttgatgtactgctgacagtcggctcggttgtgcttgctgttggtaccgttacaggcgctgtgaccgtggtcgcagttggcttgttgttcggcaacattttgttagcactctgttcacccgaagactcagaatacgtaattgtcggttgcgacgcaacagcaacggtggaattttgtgcaggcttgatcacaactccttgctctgctgcgtcggcctgggtaatggcatttccgccagtgattggcgtaccggaagcattacccacctgcaaggtctgaccaacgttcagcgcgtatggtgcctgaatattgttgcgctgagcaaggtcacggaaatcgttgccagtaatccaggcgatatagaaaagtgtgtcgccttttttcacggtataggtactgccgctataactgcctttcggaatgttcccatactgacggttatagacgatgcgtccgttttccatctgtaccggctgctgagctactggctgcactggctggatttgcggttgttgagtagcctgaatttgtggctgctgcaccggctgaatttgcggttgctgcgctgtagacgtcgtccccattttcggcggcggcgtaatcaacataccagaattagtatttgcaggcgcattgccattaacggagctgaccggtgccggtggatttgaagtgtcagaacagcctgccagccatagcgaaaccagtgacaaagccgcaatgcggcgaacggtgaattttgggcttcccgcgctcatttaccccccaggaaaaattggttaataaccagtgacataattaccgtgcaaggcaccctactgaacactggaaaagatgttcacgatacgctgacctgcggcaaaataaccaggaaaaatccaggtatttcctcacgttttaagccagctcacccttcactaaagggacaaagcgcacggcctccacggtatcgataataaattcgcctccccgacgacgcacccgtttcaaatactggtgctcctcccctacgggtaagacgagaatcccgccttcgtccagctgcgtcattagcgcagttggaatttccggcggtgccgccgtaacaatgatagcgtcaaacggcgcacgtgcctgccaaccttgccatccatcgccatgacgggttgaaacattatgtaaatcaagatttttcaggcggcgacgtgcctgccactgcaagcctttaatccgttcaaccgagcaaacatgctggacaagatgcgccaggattgccgtttgatatcccgaaccggtgccaatttccagcacccgcgactgcggcgtcagctcgagtaattcggtcattcgcgccaccatatatggctgcgaaattgtctgcccctgacctatcggcaaagcgatattgtcccaggctttttgttcaaacgcttcatcaacgaatttttcacgcggcacggcggcaagtgcattcagcacctgctcatcctgaataccttgcgcacgtaattgatccagaagtgcttgtacgcgtctgcttaccattgcgtgccaactcccacgctgtttaaccagtctgaaaccacatcttgcgcgctatgcgcagttaaatccacatgcagcggcgtgatggagacatagccctcatctaccgcagcaaaatcggtccccggaccagcatcacatttaccgcccggcgggccaatccagtacagcgtattgccgcgcggatcttgctgcgggatcacctgatctgccggatgtcgtgtaccgcagcgcgtcacgcgaatacctttgatttgatccaagggtaaatccggaacgttaatattaagaatacgcccggtgcgcagcggctctttacacagtgcgcgcaaaattgaacaggttaccgccgcggcagtgtcgtaatgtttatgcccgtcaagcgagacggcaagcgccggaaaacctaaatgacggccttccatcgcggcggctaccgtaccggaataaataacatcatcccccagattcggcccggcgttaattccggacacaacaatgtccgggcgcggacgcatcagagcattcacgccaagatagacgcaatcggtcggggttcccatttgcacagcaatatcaccattttcaaaggtaaacgtgcgcagggaggattccagtgtcagagaatttgaagcgccgctgcggttacgatcgggggcgaccacctgaacgtcagcaaactcacgcaaggctttcgccagcgtttgtataccgggtgcatgtaccccgtcatcattactcagcaatatgcgcataatcacctgttgtgttgataagttccctgacaacgctggttgcaaaactacccgccggaagccagaaacggatctctacggtgacgtcatcccaccaattccagcttaattgttgcggatacagcagcatcgctctgcgcgcggcttcaactttttcgcgcaccagtaaagcttgtaattcagtttctgcggcgacagctgcttgttcgaatgccagcgcttcacgctgagttccccattcgccactgcctggcaatgcggcggttatcatcaactctttatcgttgacgcgacgctgtaattccgccagttcttcggtggttgcgacaaaccagctaccacgtccggctaattgtagcgcatcgccgtcaacaacttgattaacgtctgcttttttgaggcgctcagcaacaatctgattaaacaacgcactgcgggctgccgacaaccaaaaactccgtttattgcgatcgcgcaccggagtattggtttgcgcccagcgctgcgccccctgcaagttgctaccgccaatcccaaaacgttgggcaccgaagtagttcggtacaccttttacgcaaatatcgatcagacgttgttcaacgtcatcgcgattgctcacttcgcgcagaaccagggtaaaggcgttacctttcagcgcgcctaaacgcagcttgcgcttgtgccgcgcatactccagcacctggcagccttccagttgaaaggcgctcagatcgggcatttccttgcccggcacgcgagcgcataaccactgttccgtaacagcatgtttgtctttttgcccagcgaagctgacttcacgggcatgaattttcaggaatttcgccagtgcatccgccacaaaacgggtattgcagccgtttttgaggattctaaccagaatatgctcaccttcaccatcaggctcaaagcccaaatcttccaccaccacaaagtcttccggattggctttcagcagcccggtgccttgcggtttaccgtggaggtaagtgagattatcaaactcaatcattttgttgccttaatgagtagcgccaccgcttcacaggcaatcccttccccacgtccggtaaatcccagtttttccgtagtagtggctttcacgttaacatcatccatatggcagccgagatcttcggcaataaacacgcgcatttgtggaatgtgcggcaacatcttcggtgcctgagcgatgatagtgacatcgacgttgccaagggtataacccttcgcctgaatacgacgccaggcttcgcgtagcagctcgcggctatcggcacctttaaatgccggatcggtatccgggaacagcttgccgatatcccccagcgccgccgcgccaagcaatgcatcggtcaacgcatggagcgccacgtcgccatcagaatgcgccagcaatcctttttcgtaaggaatgcgtacgccaccaatgataattgggccttcaccgccaaaggcatgtacgtcaaaaccgtgtccaattcgcattatgtattctcctgatggatggttcgggtgaggtaaaactcggccagtgccaaatcttccgggcgcgtgactttaatgttatccgcacggccttcgaccaactgaggatggaatccgcaatattccagcgccgaggcttcgtcggtaatagtcgcgccttcatttagagcgcgcgtcagacagtcatgtaacagctcacgagggaaaaattgcggcgtcagcgcgtgccataagccgttgcgatcaacggtatgagcaatggcatttttgcccggttcggcacgtttcatagtatcgcgcactggtgcggcgaggatcccccccgtgcggctggtttcgctcaacgccaacaatcgcgcgaggtcatcctgatgcaaacaaggacgagcggcgtcatgcaccaatacccactgcgcgtcgccagcggctttcagacctgccagcacggaatcggcacgctcatcaccgccatctacaacggtgatttgcggatgattcgccagaggaagttgtgcaaaacggctatcgccaggacttatggcaatgacgacacgtttcacccggggatgcgccagcagcgcatgcaccgagtgttcaagaatggtttgattaccgattgagagatattgcttaggacattccgtttgcattcgacggccaaatccggccgccggaaccacggcgcaaacatccaaatgagtggttgccatgttaattcccgggctgatttatcgattgttttgccccgcagactgtgcgcgcttcgacgcgtcaggcaccagacgataaaaagtttcgcccggcctggtcatgctgagttcattacgcgcacgctcttcgagcgcctcctggccgccattgagatcgtcaatttcggcaaaaagttgatcgtttcgcgctttaagtttcgcgtttgtagcttgctgtgccgccacatcatcattgacgcgggtatagtcatgtataccgttcttaccgaaccacagcgaatactgtagccagaccagaatagccagcaacagcagcgttagtttacccatcctgccccctgaaaaacggcatcatcatcccatgcatccgaagacgactctacatcctctgttggggataccgcgacaacgcgggcaaatgtaccacatttgtccattgttacgtatacccagggcgtgcagaacataatctcattattagttacggtttgaattatgaacagaggagacgggaaagtacaaattagcccagtagccacataaacagtgcgccaaacataatgcctactgtcaccagggtgaaaacaatactgtagcgtagctttccgtccatcaatgaatgcagcgcaatccccaccactaccgcgacgggcatcagcgccagaaagaaaggccaggtgtagataaagaagaacagcgtgttagagccataaatcaacatcggcatcgccagcgcaaataaccaggagataaaaccgaccacggcaccaggcagtgaccatgtggtttcttcatcctcagtaaggctgtcgttatttgttagtgtaatgttatggctattacgcatatttgatcctgttactttgacgaaccgggcatggaaacccggtggtgtctcaggatctgataatatcgttctgtctcaacagatctaataattgctgtaccaaatttgttactaattgttcaccattgagatgaatttctgccgattcaggcgcttcgtaaacggaatctattcccgtaaagttgcgcagttcaccggcacgcgctttcttatataagcctttgggatcgcgggcttcgcaaatcgccagcggcgtatcgacaaacacttcgataaagcgcccttctcctacgcgttcgcgaaccatctggcgttcggcgcggtgtggcgagataaatgcggtcagcaccaccagtccggcttcaaccatcaaattcgccacttcaccgacgcgacggatattctctttacgatcggcatcgctaaaaccgagatcgctgcataatccgtggcgaacattgtcgccatccagcagatacgtactgacgccgagtttatgtaacgcctcctccagcgccccggcgaccgttgatttaccggacccggagaggccggtaaaccacagcactacaccacgatgaccgtggtgtagctcgcgttgttgcacagtgaccggatggctatgccagacgacgttttcgtcatgcagcgccattatttatcccccagcaaatcgcgcgcgccccagtgcggaaagtggcgacgaaccagagcattcaattccagttcgaatgcactgaattcagatggcgcagcagttgcctggctaactggctcgtgcaccataccggcacccacggtcacattgctcaggcgatcgataaaaatcagcccacccgtcaccggattttgttgataacgatctaacaccagcggctcgtcaaaagtgagatccacgaggccgatcccattcagtggcaggttttcaacttcacgctgggtaaggttattaatatcaacctgatagcgaatgccatcaacacgcgcgcgcgtcttcttaccggcaattttgatgtcgtaactctgccctggagaaagcggctgttccgccatccataccacatccaccgacgcgctctgcaccgccggtaacgcttcgtctgccgccagcagcagatcgccacggctgatgtcgatctcatccgtcagcaccagggtgatcgcttctccggcaaaggcttcttcgcgatcaccatcaaaagtcacgatccgcgcgacgtttgattccacaccagagggcagcactttgacacgttgcccgacttccacgcgaccggatgccagcgttccggcgtaaccacgaaaatcgagattcgggcgattaacgtactgcaccgggaagcgcattggctgagcatccaccactcgctggatctccacggtttccagcacttcgagcagtgtcggaccgctgtaccacggcatactttcactttgcgatgccacgttgtcgccttccagtgcagagagcggcacaaagcggatatccagattacccggcagctgcccggcaaaggtcaaataatcttcacgaatacgggtgaacgtctcttcactgtaatccaccagatccattttgttgatcgccacgaccagatgtttgatccccaacagtgtggagataaaactgtgacgacgggtttgatcgagcacgcctttacgggcatcgatcagtaagatcgccagttcacatgtcgatgcgccagtcgccatattgcgggtgtactgctcgtgccctggggtgtcggcgataataaatttacgcttctcggtagagaaatagcggtaggccacgtcaatggtgatgccctgttcgcgctcagcttgcaggccgtccaccagcagagccagatccagcttttcgccctgggtgccgtgacgcttactgtcgttatgcagcgatgagagctgatcttcgtagatttggcgggtatcgtgcagcagacgaccaatcagagtacttttgccgtcatcgacgctaccacaggtcagaaaacgcagcaggcttttatgttgttgcgcaatcatccaggcttcgacgccgccttcattggcgatttgttgtgcaagtgcggtgttcatcttaaaaatacccctgacgttttttcagctccatagaccccgcctggtcgcggtcaatcacgcggccctgacgttcactggtggtggaaaccagcatctcttcgatgatttccggcagtgtttgtgcatttgactccaccgcaccggtcagcggccagcagcccagcgtacggaaacgcaccatccgttttttaatcacttcgcccggttgcaggtcgatacggttgtcatcaatcatcatcaacataccgtcgcgttccagaaccggacgttccgcagcgagatatagcggaacaatgtcgatattttccagccagatgtattgccagatatcctgctcggtccagttagagagcgggaagacgcggatgctttcgcctttgttaatttgcccgttgtagttgtgccacagctccgggcgctgatttttcggatcccagcgatggaagcggtcacggaaagagtaaattcgctctttagcgcgggatttctcttcgtcacggcgcgcaccaccgaaggcggcatcaaaaccgtatttgttcagcgcctgtttcaggccttcagttttcataatatcggtatgtttcgcgctgccgtgcacgaatggattaatccccatcgccacgccttccgggtttttatgcaccagcagttcgcagccgtaggctttagcagtacgatcgcggaactcatacatctcgcggaatttccagccggtatcgacatgcagcaacgggaaaggcagcgtacctggataaaacgccttgcgcgccagatgcagcatgacgctggaatctttaccgatagagtagagcatcaccggatttgagaattctgccgccacctcgcgaataatgtggatgctttccgcctccagttgccgcaggtgagtaagtcgtatttgatccataaccgttcctttgcaataccgctattttcttgccatcagatgtttcgactatagggagcgtaagagaacgaatgaaattaccaattagaatgagtagttccttaacggaataacgatttggcaaagctaatatcaaaaagtgcttaaggcaccggatttcgggcgtttaggaagatttgaaattgttttagcgcagcggcagtttcatactatggcggtaaaaaaatttgcatggtatttaaggactcactatgttttccgcattgcgccaccgtaccgctgccctagcgctcggcgtatgctttattctccccgtacacgcctcgtcacctaaacctggcgattttgctaatacccaggcacgacatattgctactttctttccgggacgcatgaccggaactccagcagaaatgttatctgccgattatattcgccaacagtttcagcaaatgggttatcgcagtgatattcggacatttaatagtcggtatatttataccgcccgcgataatcgcaagaactggcataacgtgacaggaagtacggtgattgccgctcatgaaggcaaagcgccgcagcagatcatcattatggcgcatctggatacttacgccccgctgagcgatgctgacgccgatgccaatctcggcgggctgacgttacaaggaatggatgataacgccgcaggtttaggtgtcatgctggaattggcagaacgcctgaaaaatacgcctaccgagtatggtattcgatttgtggcgaccagcggcgaagaggaagggaaattaggcgctgagaatttactcaagcggatgagtgacaccgaaaagaaaaatacgctgctggtgattaatctcgataacttaattgttggcgataaattgtatttcaacagcggtgtaaaaacccctgaagcagtaaggaaattaacgcgcgacagggcgctggcaattgcgcgcagtcacggaatagccgcaacgaccaatccgggtttgaataaaaattatccgaaaggcactgggtgttgtaatgacgcagaaatattcgacaaagcgggcattgctgtactttcggtggaagcgactaactggaatcttgggaataaggatggttatcagcaacgcgcaaaaacagccgcattccctgcgggaaatagctggcatgacgtaagactggataatcaacagcatattgataaggcacttcctggaagaatagaacgtcgctgccgtgacgttatgcggataatgctaccgttggtgaaggagctggcgaaggcgtcttgatgggtttgaaaatgggagctgggagttctaccgcaggggcgggggaactccaagtgatatccatcatcgcatccagtgcgcccggtttatccccgctgacgcggggaacacacatgaatgtcggttcagaccgtgtttttacccggtttatccccgctggcgcggggaacacagtgctggaccatttcaaattcacaatagattcggtttatccccgctggcgcggggaacacggaatgatatttcaataaataattataacaatcggtttatccccgctggcgcggggaacacccctcacaccgattcgccaaacggtggagaagcggtttatccccgctggcgcggggaacaccctgaacggtggggaaaaaccccataagcgctaacttaagggttgaaccatctgaagaatgcgacgcctcggtgcgcgttgagctaaccggtactaatgaaccgtgaggcttaaccttacaacgccgaagctgttttggcggattgagagaagattttcagcctgatacagattaaatcagaacgcagaagcggtctgataaaacagaatttgcctggcggcagtagcgcggtggtcccacctgaccccatgccgaactcagaagtgaaacgccgtagcgccgatggtagtgtggggtctccccatgcgagagtagggaactgccaggcatcaaattaagcagtaagccggtcataaaaccggtggttgtaaaagaattcggtggagcggtagttcagtcggttagaatacctgcctgtcacgcagggggtcgcgggttcgagtcccgtccgttccgccaccctaattaggggcgtagttcaattggtagagcaccggtctccaaaaccgggtgttgggagttcgagtctctccgcccctgccagaaatcatccttagcgaaagctaaggattttttttatctgaaataaccctctccgaagtaaatccttctaccggcatccttgccagccattcatattaatacacttcatccagcacgttaattttcaaaagatcgcgaatcaacgcatttttatcgctattttgcagccatatggcataaagcggccgtgaaagtgttgtgctatcgacaacggtatgcaggccgccttttttacgcgcccagctgacgggtagccaggtgcaaccattaagcatcgcaatctgttgctgtgccagttcagcagaactggttgtcagaatgggcacttcgtcagcaccgatcaaacctgcctcatgctgttgaaaatctggcccccactcaagtcgcagataattaagatctccctttagttttgaaggggcactggtataaagcgctaaagtgaaatatcccagcaactgactactaaattcgtccattttgggcgcttcagtggtaataagaagatcaagctggcgttcatgcagctgttttaccagagactgccgttgggcaattcgcgcttcgaactgtaagcctgtatgggcatcctgattttgatacaagcgtcccagccactgattaagcatacattcccacaacgaggcgctggcaccgatagaaaactcgttatgtcgtgaggtatgcgccacctccttacgggcggcctgccaggtgctcatgagcgtttctgcataaggcagtagtttttcaccggcagcggttaaacggatattgtttctgtggcgggtgaaaaggttcacacccagttgattttccagttgtctgattcgaaagctcactgctgactgggtcagatagagcgattcagccgctcgaccaaagtgacgcgttcggctaacttccaggaaagtttttaacaattccgtatccacagtgctctccgcaaaattatttgtcgttatgatttaaatgttttgttttacactctgtcaagcgtaactaatactccgcgccataactagctcggtcaaagaattaggagcgtgcaggatggcggaaagctttacgacgactaatcgatatttcgacaataaacattatccacgtggattctctcgtcatggtgatttcaccatcaaagaggcacaactgcttgagcgtcatggttatgccttcaatgagttggatcttggcaaacgcgagccggttaccgaggaagagaaactcttcgtagcagtatgccgtggcgaacgtgagccagtgacagaagcagaacgcgtgtggtccaagtatatgacgcgtattaagcgtccaaaacgttttcacaccctttccggcggtaaaccgcaggttgaaggtgctgaagactacaccgattctgacgattaataaaaagggcgaaatgccctttttttatgtcagtagtttctgcagatggatgagcaaacggtcaatcgctcgatagctaactgcctcctgcaaatgctgacgtgtgataatgtcagactgatcaatatcagcaatggttcgtgcaactttcaataaccgctgccaggcacgaatcgataaccccagatggatcagtgttccttccaaccacatcgcatcttcgctctcaagtttgcagaattggcgtatttccggactatccagccaggcattcagtttattctgccgcttaaattggcgctctctggcggccattacgcgttgtttaacggtggcgctgctttctcccggcactaccgttttactcaaaatgccggggggtggtaatgggatctccagtgagagatcgaagcggtcgagaaagggccccgagagccggttgagataacgtaatgtctgttctggcgtgcagcggttatggtttccctgataatgtccggtagggctgggattcatcgccgcaacaagctggaaacgggctggataggttatttttgctcgtgtgcgtgaaagatggatctgcccggattcaatcggctctcgcaaggcatccagtgtacgccgttcaaattcaggtagctcatcaagaaaaagcacgccgttatgcgccagcgaaatttcaccgggccctggaattgcgccaccgcctaccatcgcagttaacgatgcactgtgatgaggtgagcggaacgggcgctgccgccattgtttttgtactgattcagcatttaccagacttaatatcgcagcactctccagtgcctcttcattgcttaaatctggcaacaggccattaatacggctggcgagcattgttttacctgttcccggcggcccaatcagtaaaaggttgtgcccgccagcagcggtaatttccagtcctcgctttccttgttcctgaccgataacatcactgagatcatgttgtagcgcccgggatactgcatcagttggtttcgggcgttcgagagcgtgcttaccttccagaaacgcacagacagcttgcagatgatcggctatcaggcatccttcaccgttaattagccccacttcatcttcgttatctttcgcgacgataatttttctgcccgacttaatagcttcagttgcactggagattgcgccgggaacgccacgcagagcgcctgtaagcgccagttctccgactaattcatattcatctaacttattggctgtaagctgttctgaggccgccagcaacgcaatggcgataggtaaatcatatcgtcccccttcttttggcagatcagctggagccaggttgatggtgatttttttcgccggatattcatatccgctattgataatggcgctgcgcacgcgatcgcgagcttcttttaccgttgtttctggtaagcccaccatcgttaagccgggtagacctttactgatatgtacctcaacagtgatcgggggcgcatttactcccagggctgcgcgggtatgaacaattgacagtgacataagccctccttgagtcaccattatgtgcataagatatcgctgctgtagcccgctaattcgtgaattttagtggctgattcctgtttatttgtgcaagtgaagttgagttgttctggcggtggaatgatgctcgcaaaaatgcagcggacaaaggatgaactacgaggaagggaacaacattcatactgaaattgaatttttttcactcactattttatttttaaaaaacaacaatttatattgaaattattaaacgcatcataaaaatcggccaaaaaatatcttgtactatttacaaaacctatggtaactctttaggcattccttcgaacaagatgcaagaaaagacaaaatgacagcccttctacgagtgattagcctggtcgtgattagcgtggtggtgattattatcccaccgtgcggggctgcacttggacgaggaaaggcttagagatcaagccttaacgaactaagacccccgcaccgaaaggtccgggggttttttttgaccttaaaaacataaccgaggagcagacaatgaataacagcacaaaattctgtttctcaagattcaggacggggaactaactatgaatggcgcacagtgggtggtacatgcgttgcgggcacagggtgtgaacaccgttttcggttatccgggtggcgcaattatgccggtttacgatgcattgtatgacggcggcgtggagcacttgctatgccgacatgagcagggtgcggcaatggcggctatcggttatgctcgtgctaccggcaaaactggcgtatgtatcgccacgtctggtccgggcgcaaccaacctgataaccgggcttgcggacgcactgttagattccatccctgttgttgccatcaccggtcaagtgtccgcaccgtttatcggcactgacgcatttcaggaagtggatgtcctgggattgtcgttagcctgtaccaagcacagctttctggtgcagtcgctggaagagttgccgcgcatcatggctgaagcattcgacgttgcctgctcaggtcgtcctggtccggttctggtcgatatcccaaaagatatccagttagccagcggtgacctggaaccgtggttcaccaccgttgaaaacgaagtgactttcccacatgccgaagttgagcaagcgcgccagatgctggcaaaagcgcaaaaaccgatgctgtacgttggcggtggcgtgggtatggcgcaggcagttccggctttgcgtgaatttctcgctgccacaaaaatgcctgccacctgtacgctgaaagggctgggcgcagtagaagcagattatccgtactatctgggcatgctggggatgcacggcaccaaagcggcaaacttcgcggtgcaggagtgtgacctgctgatcgccgtgggcgcacgttttgatgaccgggtgaccggcaaactgaacaccttcgcgccacacgccagtgttatccatatggatatcgacccggcagaaatgaacaagctgcgtcaggcacatgtggcattacaaggtgatttaaatgctctgttaccagcattacagcagccgttaaatatcaatgactggcagcaacactgcgcgcagctgcgtgatgaacattcctggcgttacgaccatcccggtgacgctatctacgcgccgttgttgttaaaacaactgtcggatcgtaaacctgcggattgcgtcgtgaccacagatgtggggcagcaccagatgtgggctgcgcagcacatcgcccacactcgcccggaaaatttcatcacctccagcggtttaggtaccatgggttttggtttaccggcggcggttggcgcacaagtcgcgcgaccgaacgataccgttgtctgtatctccggtgacggctctttcatgatgaatgtgcaagagctgggcaccgtaaaacgcaagcagttaccgttgaaaatcgtcttactcgataaccaacggttagggatggttcgacaatggcagcaactgttttttcaggaacgatacagcgaaaccacccttactgataaccccgatttcctcatgttagccagcgccttcggcatccctggccaacacatcacccgtaaagaccaggttgaagcggcactcgacaccatgctgaacagtgatgggccatacctgcttcatgtctcaatcgacgaacttgagaacgtctggccgctggtgccgcctggcgccagtaattcagaaatgttggagaaattatcatgatgcaacatcaggtcaatgtatcggctcgcttcaatccggaaaccttagaacgtgttttacgcgtggtgcgtcatcgtggtttccacgtctgctcaatgaatatggctgccgccagcgatgcacaaaatataaatatcgaattgaccgttgccagcccacggtcggtcgacttactgtttagtcagttaaataaactggtggacgtcgcacacgttgccatctgccagagcacaaccacatcacaacaaatccgcgcctgagcgcaaaaggaatataaaaatgaccacgaagaaagctgattacatttggttcaatggggagatggttcgctgggaagacgcgaaggtgcatgtgatgtcgcacgcgctgcactatggcacttcggtttttgaaggcatccgttgctacgactcgcacaaaggaccggttgtattccgccatcgtgagcatatgcagcgtctgcatgactccgccaaaatctatcgcttcccggtttcgcagagcattgatgagctgatggaagcttgtcgtgacgtgatccgcaaaaacaatctcaccagcgcctatatccgtccgctgatcttcgttggtgatgttggcatgggcgtaaacccgccagcgggatactcaaccgacgtgattatcgctgctttcccgtggggagcgtatctgggcgcagaagcgctggagcaggggatcgatgcgatggtttcctcctggaaccgcgcagcaccaaacaccatcccgacggcggcaaaagccggtggtaactacctctcttccctgctggtgggtagcgaagcgcgccgccacggttatcaggaaggtatcgcgctggatgtgaatggctacatctctgaaggtgcaggcgaaaacctgtttgaagtgaaagacggcgtgctgttcaccccaccgttcacctcctccgcgctgccgggtattacccgtgatgccatcatcaaactggcgaaagagctgggaattgaagtgcgtgagcaggttctgtcgcgcgaatcactgtacctggcggatgaagtgtttatgtccggtactgcggcagaaatcacgccagtgcgcagcgtagatggtattcaggttggtgaaggccgttgcggtccggttaccaaacgcattcagcaagccttcttcggcctcttcactggcgaaaccgaagataaatggggctggttagatcaagttaatcaataaatacaaaaaatgggacggcacgcaccgtcccatttacgagacagacactgggagtaaataaagtatgcctaagtaccgttccgccaccaccactcatggtcgtaatatggcgggtgctcgtgcgctgtggcgcgccaccggaatgaccgatgccgattttggcaagccgattatcgcggttgtgaactcgttcacccaatttgtaccgggtcacgtccatctgcgcgatctcggtaaactggtcgccgaacaaattgaagcggctggcggcgttgccaaagagttcaacaccattgcggtggatgatgggattgccatgggccacggggggatgctttattcactgccatctcgcgaactgatcgctgattccgttgagtatatggtcaacgcccactgcgccgacgccatggtctgcatctctaactgcgacaaaatcaccccggggatgctgatggcttccctgcgcctgaatattccggtgatctttgtttccggcggcccgatggaggccgggaaaaccaaactttccgatcagatcatcaagctcgatctggttgatgcgatgatccagggcgcagacccgaaagtatctgactcccagagcgatcaggttgaacgttccgcgtgtccgacctgcggttcctgctccgggatgtttaccgctaactcaatgaactgcctgaccgaagcgctgggcctgtcgcagccgggcaacggctcgctgctggcaacccacgccgaccgtaagcagctgttccttaatgctggtaaacgcattgttgaattgaccaaacgttattacgagcaaaacgacgaaagtgcactgccgcgtaatatcgccagtaaggcggcgtttgaaaacgccatgacgctggatatcgcgatgggtggatcgactaacaccgtacttcacctgctggcggcggcgcaggaagcggaaatcgacttcaccatgagtgatatcgataagctttcccgcaaggttccacagctgtgtaaagttgcgccgagcacccagaaataccatatggaagatgttcaccgtgctggtggtgttatcggtattctcggcgaactggatcgcgcggggttactgaaccgtgatgtgaaaaacgtacttggcctgacgttgccgcaaacgctggaacaatacgacgttatgctgacccaggatgacgcggtaaaaaatatgttccgcgcaggtcctgcaggcattcgtaccacacaggcattctcgcaagattgccgttgggatacgctggacgacgatcgcgccaatggctgtatccgctcgctggaacacgcctacagcaaagacggcggcctggcggtgctctacggtaactttgcggaaaacggctgcatcgtgaaaacggcaggcgtcgatgacagcatcctcaaattcaccggcccggcgaaagtgtacgaaagccaggacgatgcggtagaagcgattctcggcggtaaagttgtcgccggagatgtggtagtaattcgctatgaaggcccgaaaggcggtccggggatgcaggaaatgctctacccaaccagcttcctgaaatcaatgggtctcggcaaagcctgtgcgctgatcaccgacggtcgtttctctggtggcacctctggtctttccatcggccacgtctcaccggaagcggcaagcggcggcagcattggcctgattgaagatggtgacctgatcgctatcgacatcccgaaccgtggcattcagttacaggtaagcgatgccgaactggcggcgcgtcgtgaagcgcaggacgctcgaggtgacaaagcctggacgccgaaaaatcgtgaacgtcaggtctcctttgccctgcgtgcttatgccagcctggcaaccagcgccgacaaaggcgcggtgcgcgataaatcgaaactggggggttaataatggctgactcgcaacccctgtccggtgctccggaaggtgccgaatatttaagagcagtgctgcgcgcgccggtttacgaggcggcgcaggttacgccgctacaaaaaatggaaaaactgtcgtcgcgtcttgataacgtcattctggtgaagcgcgaagatcgccagccagtgcacagctttaagctgcgcggcgcatacgccatgatggcgggcctgacggaagaacagaaagcgcacggcgtgatcactgcttctgcgggtaaccacgcgcagggcgtcgcgttttcttctgcgcggttaggcgtgaaggccctgatcgttatgccaaccgccaccgccgacatcaaagtcgacgcggtgcgcggcttcggcggcgaagtgctgctccacggcgcgaactttgatgaagcgaaagccaaagcgatcgaactgtcacagcagcaggggttcacctgggtgccgccgttcgaccatccgatggtgattgccgggcaaggcacgctggcgctggaactgctccagcaggacgcccatctcgaccgcgtatttgtgccagtcggcggcggcggtctggctgctggcgtggcggtgctgatcaaacaactgatgccgcaaatcaaagtgatcgccgtagaagcggaagactccgcctgcctgaaagcagcgctggatgcgggtcatccggttgatctgccgcgcgtagggctatttgctgaaggcgtagcggtaaaacgcatcggtgacgaaaccttccgtttatgccaggagtatctcgacgacatcatcaccgtcgatagcgatgcgatctgtgcggcgatgaaggatttattcgaagatgtgcgcgcggtggcggaaccctctggcgcgctggcgctggcgggaatgaaaaaatatatcgccctgcacaacattcgcggcgaacggctggcgcatattctttccggtgccaacgtgaacttccacggcctgcgctacgtctcagaacgctgcgaactgggcgaacagcgtgaagcgttgttggcggtgaccattccggaagaaaaaggcagcttcctcaaattctgccaactgcttggcgggcgttcggtcaccgagttcaactaccgttttgccgatgccaaaaacgcctgcatctttgtcggtgtgcgcctgagccgcggcctcgaagagcgcaaagaaattttgcagatgctcaacgacggcggctacagcgtggttgatctctccgacgacgaaatggcgaagctacacgtgcgctatatggtcggcggacgtccatcgcatccgttgcaggaacgcctctacagcttcgaattcccggaatcaccgggcgcgctgctgcgcttcctcaacacgctgggtacgtactggaacatttctttgttccactatcgcagccatggcaccgactacgggcgcgtactggcggcgttcgaacttggcgaccatgaaccggatttcgaaacccggctgaatgagctgggctacgattgccacgacgaaaccaataacccggcgttcaggttctttttggcgggttagggaaaaatgcctgatagcgcttcgcttatcaggcctacccgcgcgacaacgtcatttgtggttcggcaaaatcttccagaatgcctcaattagcggctcatgtagccgctttttctgcgcacacacgcccagctcaaacggcgttttctcatcgctgcgctctaaaatcatcacgcggttacgcaccggttcggggctgttttccagcaccacttccggcaacaatgccacgccacagccgagtgccaccatcgataccatcgcttcatgcccgccaaccgtggcgtaaatcatcgggttactgattttattgcgtcgaaaccacagttcaatgcggcggcgtaccggcccctgatcggccataataaacggcaccgttgaccagtccggcttctctaccgacacctgattacgcaccgggcagggcagcgcgggggcaatcagcactactgccagattctccagcatcgaaaacgccactgcgccgggcaaggtttccggtttacccgcaatcgccagatccgcttcaccagtgaccaccttttccatcgcatctgccgcatcaccagtagtaagtttaatctccaccgacgggtgttccgcgcggaagcgatccagaatcggcggcagatggctgtaggcagcggtcaccgagcagaagatatgtaattcgccagagagcgacggcccttgctgatcgatggtgtggcgcaactgctgatactgcaacagcgtttgctgggcgaaaacgcgcagctcttcgcccgcttcagtcagcgtcaccgtgcggttatcgcgcacaaacagcggctgaccgagatcttcttccaggcgctgaatctgccgtgagagcgtggatgggctaacgtgcatcgcccgcgcgctgcggccaaaatggcggctttccgccagatgcaggaaggttttcagatcgcgtaaatccacagggacagccctcgatgttgacgttgcaaaaattgcaatgtgacgttgtgaatatatcaatttccgcaataaatttcctgtcatatagtgaattcaatctcgcaaacgcgaaccgaacaataagaagcacaacatcacgaggaatcaccatggctaactacttcaatacactgaatctgcgccagcagctggcacagctgggcaaatgtcgctttatgggccgcgatgaattcgccgatggcgcgagctaccttcagggtaaaaaagtagtcatcgtcggctgtggcgcacagggtctgaaccagggcctgaacatgcgtgattctggtctcgatatctcctacgctctgcgtaaagaagcgattgccgagaagcgcgcgtcctggcgtaaagcgaccgaaaatggttttaaagtgggtacttacgaagaactgatcccacaggcggatctggtgattaacctgacgccggacaagcagcactctgatgtagtgcgcaccgtacagccactgatgaaagacggcgcggcgctgggctactcgcacggtttcaacatcgtcgaagtgggcgagcagatccgtaaagatatcaccgtagtgatggttgcgccgaaatgcccaggcaccgaagtgcgtgaagagtacaaacgtgggttcggcgtaccgacgctgattgccgttcacccggaaaacgatccgaaaggcgaaggcatggcgattgccaaagcctgggcggctgcaaccggtggtcaccgtgcgggtgtgctggaatcgtccttcgttgcggaagtgaaatctgacctgatgggcgagcaaaccatcctgtgcggtatgttgcaggctggctctctgctgtgcttcgacaagctggtggaagaaggtaccgatccagcatacgcagaaaaactgattcagttcggttgggaaaccatcaccgaagcactgaaacagggcggcatcaccctgatgatggaccgtctctctaacccggcgaaactgcgtgcttatgcgctttctgaacagctgaaagagatcatggcacccctgttccagaaacatatggacgacatcatctccggcgaattctcttccggtatgatggcggactgggccaacgatgataagaaactgctgacctggcgtgaagagaccggcaaaaccgcgtttgaaaccgcgccgcagtatgaaggcaaaatcggcgagcaggagtacttcgataaaggcgtactgatgatcgcgatggtgaaagcgggcgttgaactggcgttcgaaaccatggttgattccggcatcatcgaagaatctgcttactatgaatcactgcacgaactgccgctgattgccaacaccatcgcccgtaagcgtctgtacgaaatgaacgtggttatctctgataccgccgagtacggtaactatctgttctcttacgcttgtgtgccgctgctgaaaccgtttatggcagagctgcaaccgggcgacctgggtaaagctattccggaaggcgcggtagataacgggcaactgcgtgatgtgaacgaagcgattcgcagccatgcgattgagcaggtaggtaagaaactgcgcggctatatgacagatatgaaacgtattgctgttgcgggttaatagcgattcagagttcaaggccttctcctggagaaggccttgctattagttacggtaaagcaccttaatgatgtggtaaccgaactgggtatgcagcgggccagtcggctccagtaccggacaagagaaaactactttatcgaacgccggaaccatctgaccctggcggaattcacctaaatcaccgccgcgtttgcctgatgggcaaatggagtgtttcttcgccagcttgccgaaatcggcaccgttcttaatctgctcgagaagatccagagccagtttctcttcttttacaaggatatgcagtgctgctgctgtttttgccatgatcgtgccttgagtgaataattgtcaggcggcgattttagcatgatccgcagatgctaacgtaattgtcagtcagggaggggctggtacatatatggcaaaagcccggaaaatccgggcttcgcaggtccctcaaggggagaaaacttagggcctctatgggctacagagtcattatcggggatggtgattttattgtcaatttatgagcgatatggcattgattgacttgatgaccgccctctgtatgtctgcaaccaactcatgtggcaaacattgattaagataccctctgtaagtccttgctctgtttaatcggtttcgactgacttgttgtaccaggtcggctttggcccaacgaatctgctgatcaaagaattgcaggtcattgataacattactggctatttcaacatgcattccacgatttaacttgtcatgatcgcgagtggttgataatggaacgacgatacatgcgttgccattaatttttccgttgagcacgacaactaacctgtttttttatcatttcaggaggaatgcggccattgtaatacgtggtgctgaactgtccattctggctaacaggatagttaccaaagttgcattccagtatttcaccaaccttagggctgaaatttatcgccacgagtaaacctctccttagtaaactctgaaaaagtaataacacaacgttacgacccgatattttctaagtctaatggattcacgattaactccggtttcggtcttccctctctgatttaaacatccgcagccaaccggttagcggcttacacgcggtcacattcaaatgcgattctgctacaatcctccccccgttcgaagattgagcaatacacctatgcgtctaaaccccggccaacaacaagctgtcgaattcgttaccggcccctgcctggtgctggcgggcgcgggttccggtaaaactcgtgttatcaccaataaaatcgcccatctgatccgcggttgcggttatcaggcgcgacatatcgcggcggtgacctttaccaataaggcggcgcgcgagatgaaagagcgtgtcgggcagacgctgggtcgcaaagaggcgcgcgggctgatgatctccacttttcacacgctggggttggatatcatcaaacgcgagtatgcggcgcttgggatgaaagcgaacttctcgttgtttgacgataccgatcagcttgctttgcttaaagagttgaccgaggggctgattgaagatgacaaagttctcctgcaacaactgatttcgaccatctctaactggaagaatgatctcaaaacaccgtcccaggcggcagcaagtgcgattggcgagcgggaccgtatttttgcccattgttatgggctgtatgatgcacacctgaaagcctgtaacgttctcgacttcgatgatctgattttattgccgacgttgctgctgcaacgcaatgaagaagtccgcgagcgctggcagaacaaaattcgctacctgctggtggatgagtatcaggacaccaacaccagccagtatgaactggtgaaactgctggtgggcagccgcgcgcgctttaccgtggtgggcgatgacgaccagtcgatctactcctggcgcggtgcacgtccacaaaacctagtgctgctgagtcaggattttccggcgctgaaggtgattaagcttgagcagaactaccgctcttccggacgtattttgaaagcggcgaacatcctgatcgccaataatccgcacgtctttgaaaagcgtctgttctccgaactgggttacggcacagagctaaaagttttaagcgcgaataacgaggaacatgaagccgagcgcgttactggcgagctgatcgcccatcacttcgtcaataaaacgcagtacaaagattacgccattctttatcgcggtaaccatcagtcgcgggtgtttgaaaaattcctgatgcaaaaccgcatcccgtacaaaatttctggtggtacgtcgtttttctctcgtcctgaaatcaaggacttgctggcttatctgcgcgtgctgactaacccggacgatgacagcgcatttctgcgtatcgttaacacgccgaagcgagagattggcccggctacgctgaaaaagctgggtgagtgggcgatgacgcgcaataaaagcatgtttaccgccagctttgatatgggcctgagtcagacgcttagcggacgtggttatgaagcattgacccgcttcactcactggttggcagaaattcagcgtctggcggagcgggagccgattgccgcggtgcgcgatctgatccacggcatggattatgaatcctggctgtacgaaacatcgcccagcccgaaagctgccgaaatgcgcatgaagaacgtcaaccaactgtttagctggatgacggagatgctggaaggcagcgaactggatgagccgatgacgctcacccaggtggtgacgcgctttactttgcgcgacatgatggagcgtggtgagagtgaagaagagctggatcaggtgcaactgatgactctgcacgcgtcaaaagggctggagtttccttatgtctacatggtcggtatggaagaagggtttttgccgcaccagagcagcatcgatgaagataatatcgatgaggagcggcggctggcctatgtcggcattacccgcgcccagaaggaattgacctttacgctgtgtaaagaacgccgtcagtacggcgagctggtgcgcccggagccgagccgctttttgctggagctgccgcaggatgatctgatttgggaacaggagcgcaaagtggtcagcgccgaagaacggatgcagaaagggcaaagccatctggcgaatctgaaagcgatgatggcggcaaaacgagggaaataatcaaggccggagaagatgcgtcagcatcgcatccggcacttactcattaatgcacttctagcgaccagtggacatagctctgccactggctttcctgagcaataatctctttacccagcggatgttgggttagccaaccttgcggaagcgtcaaggtcaacagttcatggttagcctgtaatgtcatctctggcacgagatcgtcacggcgacggctggcaaaaatgatggccaggcggagtaaacggcagagttgttctgcgacgcgcggcggtacggcattttgctgatgcagcgatgagagatcgaccggattagtctggttgagcagtagcgtcgccagcaattttttctgtgcgggggtaaaaccgggaagatccagattacgcaccagataagcagcgtgttgcggcgcttgtttgaagtcaacgctcaggccgatttcatgaagctgacaggcgctgatgagcaaatcgcggcttattgcttcaagatgccattccttttccacctgatcgaagaagttagccgcaactttggctacgcgctgcgcctgatcaatatcgatcataaagcggcgctgaatattacgcagcgtacggctgcgaatatcctgctcgacggccagatgcaacatgccgtagaccaggccttcacgcagcgcaccgcccgccagggtcatacactgaatattcagttcggtaaaaatggcgatcaggatcgccagaccactcgggaacactaacgcacgttccagcgtcagcccgtcaatctccagttcctccagccgaccgcaatgaatggctcgctgtttcaattgctgcaacttttccagggtaatgcgttcatccatcccctgtgccatcatgatttcctgtaacgcctgcacggtgccggaagcaccaacgcacactttccagccgtgataccgtaattcatcggcaaccggacgtaacacttcgcgtgccgctttttctgcagcatcaaaattttcctgccccagattacgatcggcaaaatagcgttccagccaggtgacgcagcccatcgacaggctgaacaacgaggtggtttgtgcacccgtgccggttaccagttcagtactggcaccgcctatatccaccaccaggcgctgatcggcaccgccagttgtgtgagcaacgccctgataaatcagacgtgcttcctcttcaccgctgatcacctgtaccggacaaccgaggatttcctgcgctttggcaataaaatcacccgcattgacggcaagacgtaatgtcgccgtagcgacaacgcgaatttgcgagggagggatatcttgcagacgttcagcaaacaggcgcagacattgccaaccgcgctccattgcttcattagacagggcattttcgctattcaggccagcagccagacgcactttgcgttttattcgcgtcagcgtctggatgcttccagccacctcgcgcacaaccagcatatgaaaactattcgaaccgagatcaatggctgcatacagcgacgaggtggaacccatactcttcatccttcaatctgtctctgtgttggctgcattctttcacctgaatcacttactacagtatgctcatcgggattcattctcttgccatcttgatacagtttgaatgattttgagtatgacattttatttaacctgaacgacgacgattacgcggagcgccagtacgacgcggaccattgcctgtacgtgggcgcgtgaggcgcagcggttttggcagatcggtcatcaatgcgtccggattgtatttgcttaccggaattgagtgaccaatataggtctcaatagcaggcaaattcaatgcatactcttcacacgccaggctgatagagtgaccgcttgcgcctgcgcgacctgtacgaccaatacggtgaacgtaatcttcacagtcatcgggtaaatcgtagttaaagacgtgcgtcactgccggaatatgcaaaccacgcgcggcaacgtcggtggcaaccagaatatccagatcgccacgggtaaattcatcaagaatacgcagacgttttttctgcgcgacatcgcctgtcaataaaccgacacgatgaccatctgctgccaggtggccccagatctcttcacaacggtgtttggtgttggcgaaaataatcgctctgtctggccactcttcttcgatcagcgtttgcagcaaacgcattttttcttcgttagaagggtagaaaagctcttctttaatacggtggcccgttttctgttccggttccacttcaatatattcggcattgttcatctgctcgaacgccagttcacgtacccggtacgaaagcgtggcggagaacagcatgttgaggcgctggtttgcaggcggcatacggcggaacagccagcggatatctttaataaagcccagatcgtacatgcgatcggcttcgtccagtaccaccacctgaatggcaccgaggttaatgtggttctgcttggcgtagtcaattaaacgccccgtggtgccaatcagaatgtcaacgccgctttccagcactttcagctgtttgtcgtagccatcaccaccgtaagccagacccagcttcaggccagtagcttccgccagcggttctgcgtcggcatggatctgcacggcaagttcacgcgtcggtgccataattaaggcacgcggctgattcaccttgcgatcggcaatcgcaggatgagagagaagataatgaaacgttgacgtaagaaacgccatcgttttcccggtaccggtttgcgcctgcccggctacgtcacgacccgccagcgtcagcggaagggccagtgcctgaatgggcgtacagttatgaaacccttttttttcaagggcttctacaaccttcggatgcagggcgaagtcggaaaacttctgttctgttaaatgtgttttgctcatagtgtggtagaatatcagcttactattgctttacgaaagcgtatccggtgaaataaagtcaacctttagttggttaatgttacaccaacaacgaaaccaacacgccaggcttattcctgtggagttatatatgagcgataaaattattcacctgactgacgacagttttgacacggatgtactcaaagcggacggggcgatcctcgtcgatttctgggcagagtggtgcggtccgtgcaaaatgatcgccccgattctggatgaaatcgctgacgaatatcagggcaaactgaccgttgcaaaactgaacatcgatcaaaaccctggcactgcgccgaaatatggcatccgtggtatcccgactctgctgctgttcaaaaacggtgaagtggcggcaaccaaagtgggtgcactgtctaaaggtcagttgaaagagttcctcgacgctaacctggcgtaagggaatttcatgttcgggtgccccgtcgctaaaaactggacgcccggcgtgagtcatgctaacttagtgttgacttcgtattaaacataccttattaagtttgaatcttgtaatttccaacgcttcccgttttatcttaaatgcgaagtgaacagatttctggctcgtcactcaatccgtcttgtcgtttcagttctgcgtactctcctgtgaccaggcagcgaaaagacatgagtcgatgaccgtaaacaggcatggatgatcctgccataccattcacaacattaagttcgagatttaccccaagtttaagaactcacaccactatgaatcttaccgaattaaagaatacgccggtttctgagctgatcactctcggcgaaaatatggggctggaaaacctggctcgtatgcgtaagcaggacattatttttgccatcctgaagcagcacgcaaagagtggcgaagatatctttggtgatggcgtactggagatattgcaggatggatttggtttcctccgttccgcagacagctcctacctcgccggtcctgatgacatctacgtttcccctagccaaatccgccgtttcaacctccgcactggtgataccatctctggtaagattcgcccgccgaaagaaggtgaacgctattttgcgctgctgaaagttaacgaagttaacttcgacaaacctgaaaacgcccgcaacaaaatcctctttgagaacttaaccccgctgcacgcaaactctcgtctgcgtatggaacgtggtaacggttctactgaagatttaactgctcgcgtactggatctggcatcacctatcggtcgtggtcagcgtggtctgattgtggcaccgccgaaagccggtaaaactatgctgctgcagaacattgctcagagcattgcttacaaccacccggattgtgtgctgatggttctgctgatcgacgaacgtccggaagaagtaaccgagatgcagcgtctggtaaaaggtgaagttgttgcttctacctttgacgaacccgcatctcgccacgttcaggttgcggaaatggtgatcgagaaggccaaacgcctggttgagcacaagaaagacgttatcattctgctcgactccatcactcgtctggcgcgcgcttacaacactgttgttccggcgtcaggtaaagtgttgaccggtggtgtggacgccaatgcccttcatcgtccgaaacgcttcttcggtgcggcgcgtaacgtggaagagggcggcagcctgaccattatcgcgacggcgcttatcgataccggttctaaaatggacgaagttatttacgaagagtttaaaggtacaggcaacatggaactgcacctctctcgtaagatcgctgaaaaacgcgtcttcccggctatcgactacaaccgttccggtacccgtaaagaagaactgctcactactcaggaagaactgcagaaaatgtggatcctgcgcaaaatcattcacccgatgggcgaaatcgatgcaatggaattcctcattaataaactggccatgaccaagaccaatgacgatttcttcgaaatgatgaaacgctcataaatttgtcttatgccaaaaacgccacgtgtttacgtggcgttttgcttttatatctgtaatcttaatgccgcgctggcgatgttaggaaaattcctggaatttgctggcatgttatgcaatttgcatatcaaatggttaatttttgcacaggactggtgggttcggaacggactttcccttctgaataaaggtcttcgtggttatacttctgctaataattttctctgagagcatgcattgtgaatttactgacagtgagtactgatctcatcagtatttttttattcacgacactgtttctgttttttgcccgtaaggtggcaaaaaaagtcggtttagtggataaaccaaacttccgcaaacgtcaccaggggttgataccactcgttgggggtatttcggtttacgcagggatttgcttcacgttcggaattgtcgattactatattccgcatgcatctctctatctcgcttgtgccggtgtgcttgttttcattggcgcgctggatgaccgttttgatatcagcgtaaaaatccgtgccaccatacaggccgctgttggcattgttatgatggtgtttggcaacctttatctcagtagcctgggttatatctttggctcctgggagatggtgctcggaccgtttggttacttcctgacgctatttgccgtctgggcggccattaatgcgttcaacatggttgatggcattgatggcttgctgggcgggttgtcctgcgtctcgtttgcagcaatcggtatgattttgtggttcgacgggcaaaccagcctcgcaatctggtgctttgcgatgatcgccgccatcctgccatatatcatgcttaaccttggtatcctgggtcgccgctacaaagtctttatgggtgatgcgggcagtacgctgattggttttaccgtgatctggatcctgctcgaaacgacccagggcaaaacccatcccatcagcccggttaccgctttgtggataatcgccattccgctaatggatatggtggcgattatgtaccgtcgcctgcgtaaaggcatgagcccattctctcctgaccgtcagcatattcaccatttgatcatgcgtgccgggtttacttcccgtcaggcgtttgtgctgattacccttgccgcagcactgctcgcttccattggcgtgctggcagaatattctcattttgtcccggagtgggtcatgctggtgctctttttgctagcattcttcctctatggatattgcattaagcgtgcctggaaagttgctcgctttattaagcgcgtaaaacgcagactgcgtagaaatcgtggtggcagccccaatttaaccaaataaatgaggatgtgatgacacaaccaatgcctgggaaaccggccgaagacgctgaaaatgaactggatattcgtgggttgtttcgtaccttgtgggctgggaagctatggattattggcatggggctggcgtttgcgttaatcgcgctggcgtatacgttttttgctcgtcaggagtggagctcgacggcgattaccgatcgtccaacggtgaatatgctggggggatattactcgcagcagcaatttttgcgtaacctggatgtccgttcaaacatggcttctgccgaccaaccatcggtcatggacgaagcctataaagagtttgttatgcaactggcctcgtgggatacccgcagagagttctggctgcaaaccgactattacaaacagcggatggtgggcaacagcaaagccgatgcggcgttgctggatgaaatgattaacaacatccagtttatccccggagactttacccgcgcggtcaatgacagcgtgaagcttattgccgaaaccgcgcctgacgctaataacctgttacgtcagtatgttgcttttgccagccagcgtgcagccagccatctgaatgatgagctgaaaggcgcatgggcggcgcgtaccatccagatgaaagctcaggtgaagcgtcaggaagaggtggcgaaagccatctacgaccgccggatgaacagcattgagcaggcgctgaaaattgctgagcagcataatatttcgcgcagtgcgacagatgtacctgccgaggaattacctgattcagaaatgttcctgcttgggcgtccaatgcttcaggctcgactggaaaatttacaggccgtcggtccggcctttgatctcgactatgatcagaatcgggccatgttaaacaccctgaatgttggtccaaccctggatccgcgttttcagacctatcgctatttgcgtacgccggaagaaccggtaaaacgcgatagcccacgtcgtgccttcctgatgattatgtggggcattgtcggggggctgatcggggctggtgtcgcattaacccgccgttgctcgaaatagcaacactgctgcggtgagcgcaaaggcgctcgccgcttattcgaagagaatcgatgtgaaagtactgactgtatttggtacgcgcccggaagccatcaagatggcgccgttggtgcatgcgttggcaaaagatcctttttttgaggctaaagtttgcgtcactgcgcagcatcgggagatgctcgatcaggtgctgaaactcttttccattgtacctgactacgatctcaacataatgcagccaggacagggcctgacagagataacctgtcggattctggaagggctaaaacctattcttgccgagttcaaaccagacgtcgtgctggttcacggcgatacgacgacgacgctggcaaccagcctggcggcgttttatcagcgtattcctgttggtcacgttgaggctggtctgcgcacgggcgatctctattcgccgtggccggaagaggctaaccgtacattgaccgggcatctggcgatgtatcacttctctccaaccgaaacttcccggcaaaacttgctgcgtgaaaacgttgcggatagccgaatcttcattaccggtaatacagtcattgatgcactgttatgggtgcgtgaccaggtgatgagcagcgacacgctgcgttcagaactggcggcaaattacccgtttatcgaccccgataaaaagatgattctggtgaccggtcacaggcgtgagagtttcggtcgtggctttgaagaaatctgccacgcgctggcagacatcgccaccacgcaccaggacatccagattgtctatccggtgcatctcaacccgaacgtcagagagccggtcaatcgcattctggggcatgtgaaaaatgtcattctgatcgatccccaggagtatttaccgtttgtctggctgatgaaccacgcctggctgattttgaccgactcaggcggcattcaggaagaagcgccttcgctggggaaacctgtgctggtgatgcgcgataccactgagcgtccggaagcggtgacggcgggtacggtgcgtctggtaggcacggataagcagcgaattgtcgaggaagtgacgcgtcttttaaaagacgaaaacgaatatcaagctatgagccgcgcccataacccgtatggtgatggtcaggcatgctctcgcattctggaagcgttaaaaaataatcggatatcactatgagttttgcgaccatttctgttatcggactgggttatatcgggctgccaacggcagcagcgtttgcctcacggcaaaaacaggtaattggtgtcgatatcaaccaacatgcggttgataccatcaatcgtggcgaaatccatatcgtcgaacctgatttggcgagtgtagtaaaaactgccgtagaaggcggttttttacgagcgagcacgacgccagttgaagcggatgcctggctgattgctgtacccacgccgtttaagggcgatcatgagccagatatgacctacgttgaatcggctgctcgctccattgcgccagtgctgaaaaaaggcgcgctggtgatccttgaatccacctcgccggtggggtcaaccgagaagatggcagaatggttagcagagatgcgtccggatctcactttcccgcagcaggtgggcgagcaggcggacgtcaacattgcttactgcccggaacgcgtgttaccaggacaggtaatggtcgagctgattaaaaacgatcgcgtgattggtggtatgacgccggtttgttcggcccgcgccagcgaactgtacaaaattttcctcgaaggtgagtgtgtcgtcactaactcgcggacggcggaaatgtgtaagctcaccgaaaacagcttccgcgatgtgaatatcgcttttgctaatgaattgtcgctgatttgtgccgatcaggggattaacgtctgggaactgattcgcctggcgaatcgtcaccctcgcgttaatattcttcagcctggccctggcgtgggcggtcactgcattgctgttgatccgtggtttatcgtggcacagaacccccagcaggcgcggcttatccgtaccgcgcgcgaagtgaacgatcacaaaccgttctgggttatcgatcaggtgaaagcggcggtggctgattgcctggcggctaccgataaacgcgccagtgaactgaaaatcgcctgctttggtctggcgtttaaaccgaatattgatgacctgcgcgaaagcccggcgatggaaatcgctgaactgatcgcccagtggcatagcggcgaaactctggttgttgagcctaacatccaccagttgccgaaaaaactgaccgggctttgtactctggcgcagcttgacgaggcgctggcaacggcagacgtgctggtgatgctggtcgatcatagtcagttcaaagttatcaatggcgacaatgtccatcagcagtatgtcgtcgatgccaaaggagtctggcgctgatgagaaaaattctgataacaggtggtgccgggtttattggctcggcgctggtgcgttatatcatcaacgaaacgagcgacgcggtggtagtggtcgataagctgacctacgccggaaacctgatgtcgctggcaccggtcgcgcaaagcgagcgctttgcctttgagaaagttgatatctgcgatcgggcagaactggcacgcgtattcactgagcatcagccagactgtgtcatgcatctggcagccgaaagccatgttgaccgttctattgacggcccggcagcgtttattgaaaccaacattgtcgggacttatacattgcttgaagcggcgcgggcttactggaatgcgctgacggaagataaaaaatcagcgttccgttttcatcatatctccactgacgaagtatatggtgacctgcactcgacggatgatttcttcaccgaaaccacgccgtatgcgccgagcagcccttattccgcgtcaaaagccagcagcgaccatctggtgcgcgcctggctgcggacctatggtctgccgacgcttatcaccaactgctcgaataactacggcccttaccactttccggaaaaactgatcccgctgatgatcctcaacgcgctggcgggtaaatcgctgccggtatatggcaacgggcagcaaatccgtgactggctgtatgtggaagatcacgcccgcgcgctgtattgcgtggcgaccaccgggaaagtcggtgaaacctataatattggtggtcacaacgagcgtaagaatctcgatgttgtggaaaccatttgcgagctgctggaagaactggctccgaacaagccgcacggcgtggtgcactatagtgacttgatcacctttgtcgctgaccgtccggggcatgatctgcgttatgccattgatgcttcgaaaattgcccgtgaacttggctggctgccgcaggaaacctttgaaagtggaatgcgtaaaacggtgcagtggtatctggctaatgaaagctggtggaagcaggtgcaggacggcagctatcagggcgagcgtttaggtctgaaaggctaattttcagcggaggcaaacatgaaaggtattatcctggcgggcggttccggcacccgattgcatccgattacgcgcggcgtatcgaagcaactgttgccgatttacgataagccaatgatttactatccgctgtcggtgctgatgctggccggtatccgcgaaattctcatcatcactacgccggaagataaaggttatttccagcgcctgctgggcgatggtagtgagttcggtatccagctggaatatgccgaacagcccagcccggacggtctggcgcaggcctttatcatcggtgaaaccttccttaatggtgaaccttcttgtctggtgctgggcgataacatcttcttcggtcagggcttcagtccgaagctgcgtcatgttgcggcgcgcaccgaaggggcgacggtttttggctatcaggtgatggacccggaacgctttggcgtggtggagtttgacgacaatttccgcgctatctcgctggaagaaaagccaaaacagccgaagtcaaactgggcggtgaccgggctttatttctacgacagtaaagtcgtggagtacgcaaagcaggtgaagccgtcggagcgtggtgaactggagattacctccatcaaccagatgtacctcgaggcgggcaacctgaccgttgaactgctcgggcgcggatttgcctggctggataccggcactcacgacagcctgattgaagccagcacctttgtacagacggtggaaaaacgccagggctttaagattgcctgcctggaagagattgcctggcgtaacggctggctcgatgacgagggtgtgaagcgtgctgccagttcattagcgaaaactggctacggccaatatctgctggagttacttcgtgcccgtccgcgccagtattgagccactaacctgggaaaacgccttctttggtgttaacagcgccatcgtgcgcattacgtctgaagcaccgctcctgacgccagacgcgttagcgccgtggtcacgggtgcaggccaaaattgcggcatcaaatacgggtgaactggatgccctgcaacagctgggattctccctggtagaaggtgaagttgatttggcgctacccgtgaacaatgccagtgatagcggtgctgtagtggcacaagagaccgatattcccgcattacgtcagttagccagcgccgcatttgcgcaaagccgttttcgtgcgccgtggtatgcgcctgacgccagcagtcgcttttatgcacagtggattgaaaatgccgtgcgcggcacctttgatcatcaatgtctgattttacgtgcggcgtccggcgatattcgcggctatgtctctttacgggaactcaatgcgacagatgcgcgaattggcctgctggctggacgcggtgcaggtgctgagctgatgcaaacggcgctaaactgggcgtatgctcgcggtaaaacaactttgcgggtggcgacccaaatgggcaacaccgccgcgcttaaacgatacatacaaagtggtgcgaatgtagaaagcaccgcgtactggttatacaggtgatcacatgattccatttaacgcaccgccggtggtgggaaccgaactcgactatatgcagtcggcaatgggtagcggcaaactgtgtggcgatggcggttttacccgtcgctgccagcagtggctggagcaacgttttggcagcgccaaagtgttactgacgccgtcctgcaccgcttcgctggagatggcggcgctgctgctcgatatccagcctggcgatgaagtgatcatgccgagctacacctttgtctccaccgccaatgcctttgtgctgcgtggcgcaaaaatcgtttttgtggatgttcgcccggacaccatgaacatcgacgaaacgctgattgaagcggcgatcaccgacaaaacgcgcgttatcgtgccggtccattacgcgggtgtggcctgcgaaatggacaccattatggcgttggcgaaaaagcataatttgtttgtggtagaagatgccgctcagggcgtgatgtccacttacaaagggcgtgcactgggaaccattggtcatattggctgctttagcttccatgaaaccaaaaactacacggcgggcggtgaaggcggcgcgacgctgattaacgataaagcgttaatcgaacgagccgagatcatccgtgaaaagggcactaaccgcagccagttcttccgtggtcaggtcgataaatatacctggcgcgatattggctccagctatttgatgtccgatctgcaagctgcatacctgtgggcgcaactggaagcagcggatcgtatcaaccagcaacgtctggcgctgtggcaaaactactacgatgcgttagcgcctctggcgaaagccgggcgtatcgagctgccgtcgattcccgatggctgcgtgcagaacgcgcatatgttctacattaaactgcgggatattgatgaccggagcgcgttgattaactttctgaaagaagcggaaatcatggcggtgtttcattacattccgctgcacggttgccctgcgggggaacactttggtgagttccacggtgaagatcgctacaccaccaaagagagcgagcgcctgctgcgcctgccgctgttctacaacctgtcgcccgtcaatcagcgtacggtaattgcgactttgttgaactacttttcctgatatgtcgttggcaaaagcgtccttgtggacggcggccagtacactggtcaagattggtgccgggttactggtcggtaagttgctggcggtgtcatttggtccggcggggcttgggctggcggcaaatttccgccagttgattaccgtgctcggcgtgcttgccggggctggcatctttaacggtgtaaccaaatacgttgcccagtaccatgataatccgcaacagctgcgccgcgtggtcggcacttcatcagcgatggtacttggtttctctacgctgatggcgctggtttttgtgctggcagctgcgccaatcagccagggattgtttggtaataccgactatcaggggctggtgcgtttagtggcgctggtgcaaatggggatcgcctggggcaacctgttactggcgctgatgaaaggctttcgcgatgccgcaggtaatgcgttatcgctgattgtcggcagcttgattggcgttctcgcgtactacgtcagttaccgtttgggcggttatgaaggggcgttgctgggtctggcgctgattcccgcgctggtggtaattcctgccgccatcatgttgatcaaacgtggtgtcatcccgttaagctatctgaaacccagctgggataacggtctggcagggcagttgagcaaatttacgctcatggcgttgattacgtcggtgaccttgcctgttgcttacatcatgatgcgtaaactgctggcggcgcagtatagctgggatgaggtggggatctggcaaggggtgagcagtatttccgatgcctacctgcaatttattacggcatcgttcagcgtatatttgctgcccacgttgtcgcggctaacggaaaagcgcgatatcacccgggaagtggttaaatcgctgaaattcgtcttaccggcagtggcggcggcgagttttaccgtctggctgctgcgtgattttgctatctggctgctgttgtcgaataaatttaccgctatgcgcgatctctttgcctggcagttagtgggtgatgtgttaaaagtgggcgcttatgtctttggttatctggtgatcgccaaagcgtcactgcggttttatattctggcggaagtcagccagttcactttattgatggtatttgcccactggctaatccctgcgcatggtgcactgggcgcggcgcaggcatatatggcaacttatatcgtctatttttctctttgttgtggcgtgtttttactctggcgtaggcgggcatgactgtactgattcacgtactgggatcggatatccctcaccataaccgaaccgttttgcggtttttcaatgacgcgctggccgcgacgagcgagcacgcgcgcgagtttatggttgttggcaaggacgacggcttaagtgatagctgtccggcgctttctgtgcaatttttccctgggaaaaaatcgctggcggaagcggtcatcgcgaaagcaaaagctaaccgtcagcagcgttttttcttccacggtcagttcaatcccacactgtggctggctctgctgagtggtggcattaagcccagccagtttttctggcatatctggggggcagacctgtatgagctttccagtggcttgagatataagcttttttacccactacgtcgcctggcgcaaaagcgagtcggctgtgtatttgccacccgcggcgatttgagcttttttgccaaaacgcacccaaaggtgcggggcgaactgctgtacttcccgacgcggatggacccttcgctcaatacgatggcgaacgatcggcaacgtgaagggaaaatgaccattctggtggggaactccggcgaccgcagcaatgagcatattgctgccttgcgcgccgttcatcagcaatttggcgatacggtaaaagtggtggtgccgatgggatatccgcctaataacgaagcgtacattgaggaagttcgtcaggcggggctggagttattcagcgaagaaaatctacaaattctgagcgaaaaactggaatttgacgcctatctggcgctacttcgtcagtgcgatcttggttactttatttttgcccgccagcagggcattggtacgctgtgcttactgattcaggcgggcattccttgtgtgcttaaccgggaaaatccgttctggcaggatatgacggaacaacatttgccggtgctgtttactaccgacgatctcaacgaggatattgtgcgtgaagcgcagcgccagttggcgtcggtggataaaaacaccattgccttctttagccctaactatctacaaggctggcagcgggcgttggcgattgccgccggggaggtcgcatgagtctgctgcaattcagtggcctgtttgttgtctggctgctctgcacgctgtttattgccacgctgacctggtttgagtttcgccgtgtgcgctttaacttcaatgtcttcttttcattgctgtttttgctcacctttttcttcggcttcccgctgaccagcgtgctggtatttcgctttgatgttggtgtcgcgccgccagaaatcttgttgcaggcgttgctttctgcgggctgcttctacgcggtttactatgtcacctacaaaacccgcctacgcaaacgcgttgctgatgtaccgcgccgtccgctgtttaccatgaaccgcgtggagaccaatcttacgtgggtgatcctgatgggtatcgcgctggtaagcgtcggcatcttcttcatgcacaacggctttttgctgttccggcttaactcctacagtcagatcttttccagtgaagtctccggcgtggcgttaaaacgcttcttttactttttcatcccggcgatgctggtggtctactttctgcgccaggacagcaaagcgtggctgtttttcctcgtcagcacggtcgcctttggcttgctgacttatatgattgtcggcggcactcgcgccaatatcatcatcgcattcgctatcttcctgtttattggcattattcgcggctggatttcgttgtggatgctggcggcggcgggcgtgctggggattgttggcatgttctggctggcactaaaacgctatggaatgaatgtgagcggcgatgaagcgttctatacgtttctctatctcactcgcgacaccttctcgccgtgggagaatctggcgttgctgttgcagaactacgacaacatcgacttccagggcctggctccaattgtccgcgatttctatgtctttatcccttcctggctgtggccgggtcgcccgagtatggtgctgaactcagccaactactttacctgggaagtgctgaataaccactccggactggcgatctcgcctacgcttataggctcactggtggtgatgggcggcgcgttgttcatcccgctcggggcgatcgtggttggtctgatcatcaaatggttcgactggctgtatgagctgggcaaccgcgagcctaatcgctataaagctgcgatattgcacagtttctgctttggggcgatcttcaatatgatcgtgctggcgcgtgaagggctggattcgtttgtctcacgcgtggtcttttttatcgtggtcttcggcgcatgtctgatgatcgcaaaactgttgtactggctttttgaaagcgccggactcattcataaacgtacaaaatcatcgctccggacgcaggttgaaggataacaatgaataacaacaccacggcaccaacctatacgctgcgtggcttacagttgattggttggcgtgatatgcagcacgccctcgattatctgtttgctgacgggcagcttaagcagggaacgctggttgccattaatgctgaaaaaatgctgactattgaagataacgccgaggtcagggagttaattaacgctgccgaatttaaatatgcggatggcatcagcgttgtacgttcagtacgtaaaaagtacccgcaggcgcaggtttcccgcgttgccggtgccgatctctgggaagagctgatggcgcgcgcaggcaaagaagggacgccggtatttcttgtgggcggtaaacctgaagtgctggcgcaaactgaagctaaactgcgcaaccagtggaatgtgaatatcgttggcagtcaggatggttattttaaacccgagcagcgtcaggcgctgtttgaacgcattcatgccagcggtgcgcaaatcgtcaccgttgcgatgggatcgccaaagcaggagatcatcatgcgcgactgccgtctggtacatccagatgcgctgtatatgggcgttggcgggacttacgatgttttcaccggtcacgtaaaacgcgcaccgaaaatctggcaaacgctggggctggagtggctctaccgcctgctttcgcagccgagccgcattaagcgtcagcttcgtttgctgcgttatttacgctggcactacaccggcaacctatgattttcctctctttgtaaagcgacggagtggtcactccgtcgcctgtctgcttttttattacacaaagcattcaaatttttaatgctttatttgccatttctcctgaattacgaaaacatttgcaacactcgatgtacccataacgataaccggtaacaccggaaagcatgcaaacacaacacgaggatttatggcagataacaaaccagagctacagcgtgggctggaagctcgacatatcgaactcatcgccctggggggcaccattggcgtcggcctgtttatgggggccgccagtaccctgaaatgggccgggccatccgtattgttggcctatatcatcgccgggctgttcgtctttttcatcatgcgttcaatgggcgaaatgttgttcctcgaaccggttaccggttcgttcgccgtttatgcgcatcgttatatgagcccgttctttggctatctcaccgcctggtcttactggtttatgtggatggcggtggggatctctgaaatcaccgccattggcgtttatgtccagttctggttcccggagatggcgcagtggatacccgcattgatcgcagtggcgctggtggcgttggcgaatctggcggcggtgcggttgtacggcgaaatcgagttctggttcgcgatgatcaaagtcaccacgattatcgtgatgattgtcattggcctgggcgtgattttctttggctttggcaatggcgggcagtcgattggttttagcaatctcacagagcatggcggtttctttgcgggtggctggaaagggttcctgaccgctctgtgtattgtggtggcgtcctaccagggcgtggagctgattggcattactgccggtgaagcgaagaatccgcaggtgacgctgcgcagtgccgtaggcaaggtgctgtggcggatcctgattttctacgtaggcgcgattttcgttatcgtcaccatcttcccgtggaatgaaataggcagcaacggcagcccgttcgtactgacttttgccaaaatcggtattaccgcagcggcgggcattatcaactttgtggtgctgacggctgcgctctctggctgtaacagcggcatgtacagttgcggacgtatgctctacgcactggcgaaaaaccgtcagttaccggcggcaatggcgaaagtttcccgtcacggcgtaccggttgcgggtgtggcagtatctattgctattctgctaattggctcatgcctgaactacatcattcccaatccgcagcgtgtgtttgtctacgtctacagtgccagcgtgcttccggggatggtgccatggtttgtgatattgataagccagctgcgttttcggcgtgcacataaagcggcgattgccagccatccgttccgctcaatcctgttcccgtgggccaattacgtaacaatggcattcctgatttgcgttttgatcggcatgtactttaatgaagatacgcgtatgtcgctgtttgttggcatcatctttatgctggcggtgacggcgatttataaagtttttggccttaatcgccacgggaaagcgcataaactggaggaataagcagcaaaacgcacaaaccgtaaccaaacgcgcaatttatttaaaaagggactagacagaggggtgggaagtccgtattatccacccccgcaacggcgctaagcgcccgtagctcagctggatagagcgctgccctccggaggcagaggtctcaggttcgaatcctgtcgggcgcgccatttagtcccggcgcttgagctgcggtggtagtaataccgcgtaacaagatttgtagtggtggctatagctcagttggtagagccctggattgtgattccagttgtcgtgggttcgaatcccattagccaccccattattagaagttgtgacaatgcgaaggtggcggaattggtagacgcgctagcttcaggtgttagtgtccttacggacgtgggggttcaagtcccccccctcgcaccacgactttaaagaattgaactaaaaattcaaaaagcagtatttcggcgagtagcgcagcttggtagcgcaactggtttgggaccagtgggtcggaggttcgaatcctctctcgccgaccaattttgaaccccgcttcggcggggttttttgttttctgtgcatttcgtcaccctcccttcgcaataaacgcccgtaataactcattgccccacggtatgatttcgcccttaacgtattgaaggatgacttcaggcaaggagtgaccatgctgcaacaggttccaacgcgtgcttttcatgtgatggcgaaaccgagtggttccgattgtaatctgaactgtgactactgtttttatctcgaaaaacaatccctttaccgcgaaaagccagtcacgcatatggacgatgacacgctggaagcgtatgtccgtcactatatcgctgccagcgaaccgcaaaacgaagtggcttttacctggcagggcggcgaaccaacgctactcgggctggagttttaccgccgtgccgtagcgctacaggcgaaatatggtgctggcaggaagataagtaacagcttccagactaacggcgtgctgctggatgacgaatggtgcgcgtttctcgcggagcatcattttcttgttggtttatcgctggatggcccgcctgagatccacaatcaatatcgcgtgactaaaggtggcagacccacgcataagctggtgatgcgtgccctgacgttcctgcaaaaacatcatgtcgactataacgtgctggtctgcgttaatcgcaccagcgcgcagcaaccgttgcaggtatatgattttttgtgcgatgcgggagtggaattcatccagtttattccggtggtcgagcgcctggctgatgaaacggctgcccgcgaaggactgaaattgcatgcgcctggtgatattcagggtgagctaacggaatggtctgtgcgccccgatgaatttggtgaatttctggtggcgatttttgaccactggatcaaacgcgacgtcggcaagattttcgtgatgaatatcgaatgggcgtttgccaattttgtcggtgcgccgggtgcggtttgccatcatcagccaacctgtgggcgctcggtgattgttgagcacaatggcgacgtttacgcctgcgatcactatgtttatccgcaatatcggctggggaatatgcaccagcaaacaattgcagaaatgatcgattccccgcaacagcaggtgtttggtgaagataaatttaagcagttaccggcgcagtgtcgtagttgtaacgtgttaaaagcgtgctggggaggctgcccgaaacaccgctttatgctcgatgccagcggcaagcctgggctgaattatttatgtgccgggtatcagcgttattttcgccatctgccgccgtatcttaaagcaatgtctgatttgctggcgcatggccgcccggccagcgacattatgcatgcgcatttgctggtggtgagtaagtaaaaaagcggccattttgtggccgcctgcggttgattgccggatgcggcgtaaacgccttatccggcctacatgatcgtgcaaattcaataaattgcagcgttctgtaggctggataagatgcgtcagcatcgcatccggcaaaggcagatctcagcgatagcgccggcttagtcagatttaatctgcgcgcgtggtggatattttttcaggatctccatatacgcgtgcatttcggtctgtagcggtacacccatcggaatatggcgcacgccgatggagtcgctttcctgcggatcggtgtagaggttaaacaccgacgatcccgccgtttgcattactgtgccggtgaatccaccctgatatccgctctgggtataagcgtaaggttgctgaatcaggacgtgatacttgaactcatccatacgcacagcagcgagtttaccgttgaggaagtagtgctcggccttacggttagactgaccatttgttcccaggaagaaggatgtctggtccacaccatcgataaaggtggttttcggcactaaattcgccactttcgctccaggatgccctgccagatccagcgcggtagggaagagatctgccagatcgacaataccgtcagatttacgcggttggatcatccctttccagtaaacgaaagtcggtacgcgaacgccgccttcccaggtcgaacctttcgcaccacggaacggggtgcgtccgtgcggcggtacttcggcttccggtccgttatcggaggtaaagacgatcagcgtgttatcaagctgaccgtttttctccagtgttttatacagattagcgaacacatcgttcatctccaccatgcagtcgccatacgaggtgcgtgccggagagctacccgcatatttagcgttcgggtagttatcgaagtgacagccgcgagtgccgtaatagaggaagaaaggcttatcgctcttcgccatcttgtcgaggaacttaacgccatattccatccagcgttgatccagatcttccatatatttcggcgtaatgtcggcaatggcctgttgttcgccgccgcgcactgcatgaacatcatctttgctgaacggtaattgcttgatgtattcagaacggtccggactcagggccacttccggattgacgtgaacgtcgcgccattcggtgtacatatcagacaccgagttaaagccacggaaatcatcaaagccaacgttctgcggctgcgactctttgttttcccccatatgccatttcccgatagcctgggtgacgtaaccttggtcgtgcagcaattgcggcagggtggttaacccttgcagacctcccggttgcccgtacattggcggcatcagaatgccgtggtggatggagtattgtccggtgagaatggtggcgcgggttggggaagagcttggttgagaatacgccgacgttaaaatcagcccctggctggcaactgcatcgatatctggtgtagggttacccaccgccacgccgccaccgttaaaaccgacgtccatccagcccacatcgtccagcaggaagataaccacattgggcttcttaccggtttttttctcaagttctgccagcttctgctgggtttctttatcctgcgccggatgctgcattactggcatcatgttgtcggcaatagtggtcgccggtttaaccagatactggtttgggtgatcgtatccggcaaagcctttgcgtgcggtggcagttgacggggtatctgctgcgctggccatgagaggaagagcggcggcgacagcaacaacaagacgtttgggtgaaaacgaaatttccatgcaaaatgctccggtttcatgtcatcaaaatgatgacgtaattaagcattgataattgagatccctctccctgacaggatgattacataaataatagtgacaaaaataaattatttatttatccagaaaatgaattggaaaatcaggagagcgttttcaatcctacctctggcgcagttgatatgtaaggcaggtttattatatcgcgttgattattgatgctgtttttagttttaacggcaattaatatatgtgttattaattgaatgaattttatcattcataataagtatgtgtaggatcaagctcaggttaaatattcactcaggaagttattactcaggaagcaaagaggattacagaattatctcataacaagtgttaagggatgttatttcccgattctctgtggcataataaacgagtagatgctcattccatctcttatgttcgccttagtgcctcataaactccggaatgacgcagagccgtttacggtgcttatcgtccactgacagatgtcgcttatgcctcatcagacaccatggacacaacgttgagtgaagcacccacttgttgtcatacagacctgttttaacgcctgctccgtaataagagcaggcgtttttttatgtgtcaggaaggccccggaggtgcttgcccccgggtgagaaggaactactgtggtgggttgttctgcaacgttaacatcaaaccgtcgtgacgcatcgctgcagcttcttccggcttgtgcagtctgtccagcgcgtcggcaagccatgcgtaatcgtaggcgtccggacgttgtttcagcgctgcgcggaaggcgagcgatgcttcctgccattctccgtgcttcatcagtgactggcccagtgtgctccacaacagcgggcgatcgccgacgtttttgatctgctggcgcagcactttttccagctgttccggattgttggttttcagtcgaggaatcggcagcagtaggcgatcgtcgtactggcgtttcaggccatcgatgataatttgctgggcagtatcatgatcgtcacattcaataagatgttccgccattgccacctgcaacgctacctgatgacgcgttttccggctttggtttttccaccagttacgcaaaccttcactaccgttatcggcacgcgcctgatccatcaggccaatccatgcctgttgttccagcattgcacgatgttcttcatcaccaacatgggctttcgccattgatgggatgatatccagcagagaactccatgcacctgtgcggatatacgcctgttccgccagacgtaatacttccggatggcgtggcgtaacttccagcagcttatccacgccgtggcgtgcagcatggttttcattacgggccagttgcagacgtacacgggtgatttctaccggaatggtgtcattgccggccagctccgctgcgcgttccagatgttggttggcgcgcgcttcatcaccacgttgttgcgcggcttcggcagccagtagatagttcaccaccggttgttcagcgtgatcggcatttttcgccatcagcttttcaacttgctgataatcgccttccgccagtttcagcagcgcctgttcggtctgcttacgtgcacggcgacgcttacgcccgacaaaccacccacgggtgtgcgcgccagtgcggaagatccgccgcagtagccactcaatggcaaacagcactaccatcgccagaatcaatatgatcgccaggcccgtgacgctggtttcgatattgtagttgtcggtctggatcagcacataaccctgatgaccggcaatcatcgggccaaccactatccccgcaatcagcaacacaaagagtaataacacttttagcatggttattctccttgcggcgcggctgccggagtatcaccttgcggtgcaggtgcaggtgcaggtgcaggtttagcttccgttgtccctgctgccggttgtgccagcaggttacgcacgcgagtctgcatcagtttttccagcatcgcctggctttgcagggtttccggaagatccatcgagatattttgctggcttaactggtccacctcgtcgaggaacgctttggtggtggcatcatcagtatcgtagtaagcacgtacccaggtggagacgttctccagcgcctggcgataagtctcttcctggtgacgcggtacagcttgtgctgcgaccagcaggcgagagcgaatattttcgcgcagatagatatcctgatttggcgctaacagcggtacggcggtgtcatcacgacggcgaatcgtaatgaagttgtccataaagttctgccagcttttttgcagattgatacgccattcgctgatggaactggaaagctcttcaccgtctgaatccatcggcgaaccatcgctgtcattatcggccagacgcaggttatctacctgatttgaaagctgattaagcttaaggatgatgccgtcataatccacctgcgatactgcagaaaggctggcgatatcatcggtaattgcccgacgaacggtaatcagactcgggtcattcatatccgccaggctggcgtctgcacttttcagcaacgctgcagcggtcgtgacgtcctgatcgctccacagcttccgtccggcgagtttcaccagaaaatcggcctgagccagcagccaggttttagcatcgctgccggaaatggtggcgaccttttgttggacctcatccaactgttttgccagcgtttcttgctgacgattcgcctgcttaagctgtgcagcttgttgcttaataatgccttccagctcggctttttggctctcctgggctttttgcaatgccgtcagttggttagccagggcatcgctggtggcggtctgattgacggcctgttgtttaccccagccatacaaaccgacgcccgccgccagagcaatagcgatagccaccgcgctgagaatcaatgcggtattgttcttactctttttttctgttgcgacaggttgtgacgtggtgtccacggcctccctggtctcttcaaccacggcggaggttttttcttgttccgtcattatggcttcctgttatgagagttattgtaatgcccgtaaaagcgcatcgttgtcagcgttatcggcgaccttaatgtcttgccagcccagttcccgggcgagtttcgccaaacgctcactgacgaccaatagtcgacagtgtagtaaccagtgctcacgataccattgtgggatcagcgaccagagttgctgcaacatttcaccgctggtaacaacgaccgtcgtcacctcgcgggattgccagcgcatcgcttcttctgcaccatcgtaatggattgcgcatcgttgataacattcacaaaaagtgacctcagcaccgcgcgccgtcagggtatccccaattagctcacgaccaccattgccacgtaatatcagcgcacgtttgcccgcaatattttgtaattcaggtaattgtagcaagacttcgctgatttcccgatcctgcgggtagagaatcttctgtccgcttacggtatgtagtgccagtgcggtggtgcgtccaatggcgaaataatcaggtagtcggggccatttacgatcttgctgatgcagctgtgattgggcaaaagcaaccgcgtgttgcgagagggcaaacaacagatcgctctcccccagcgctgccagttgatcagcaagttgcggtaattgttgacccggagaaaactcaatcagcggaaaatgccaggccacctgccccagtgtgcgcagacggctcactaactcttctccagcgggagacgggcgggtgacaaggatactcatgccggggcgtctccgttatagacttcagcgaggatctcgcgcgcgccgttattcagtagctcttctgccagcgaaatccccatttgttcggcatcttgcggcgcaccgcggcgttcaccgcgaataatctgcgaaccgtccggcgcgccgaccagcgcacgcagccagatttcgccatcaataagctcggcgtagctaccaattggcacctgacatccgccttcgagacgggtattcatggcgcgttctgcggtaacgcgcagtgcagtttcgtggtgattcagcgcggcaagcagctcgcgagtgcgtgaatcatcaaggcggcattcaatacccaccgcaccttgtcctaccgccggaagagaaatctcgggtggcaacgcggcgcgaatacgtgactccagacctaaacgttttagtccggctacggcaagaatgatggcatcgtattcgccgttatccagtttgctcaggcgagtgccgacgttgccgcgcagggagcggataatcagatccggacggcgttcagccagttggcactggcgacgtaaactggacgtcccgacgatactgcctgccggtaacgcatccagactgtcatagttattggacacaaaggcatcgcgaggatcttcacgctcacaaatagtgaccagtcccagaccttgcgggaattcaaccggcacatctttcattgagtgtacggcgatatcggcgcgattttcgaggagcgcgacttccagctcttttacaaataagccttttccgcctactttcgccagcggcgtatcaagaatcacatcgccgcgcgtcaccatcggtaccagttcaacgaccaggcccggatggctcgccatcaacttgtctttgacatagtgtgcctgccagagtgcaagtgggctttggcgtgtggcaattcttaaaacattgtctaacatgcttgttaccgtcattatcatccgtggtccatcctaacatccttgccagagtgatgtcagtgttgtggtgaaacgtagacgcctgcgcaaaccgtaaaatgaggtctggcagtggatcctgacaggcgtttcacgccgttgtaataaggaatttacagagaataaacggtgctacacttgtatgtagcgcatctttctttacggtcaatcagcaaggtgttaaattgatcacgttttagaccattttttcgtcgtgaaactaaaaaaaccaggcgcgaaaagtggtaacggttacctttgacatacgaaatatcccgaatgccgcgtgttaccgttgatgttggcggaatcacagtcatgacgggtagcaaatcaggcgatacgtcttgtacctctatattgagactctgaaacagagactggatgccataaatcaattgcgtgtggatcgcgcgcttgctgctatggggcctgcattccaacaggtctacagtctactgccgacattgttgcactatcaccatccgctaatgccgggttaccttgatggtaacgttcccaaaggcatttgcctttacacgcctgatgaaactcaacgccactacctgaacgagcttgaactgtatcgtggaatgtcagtacaggatccgccgaaaggtgagcttccaattactggtgtatacaccatgggcagcacctcgtccgtagggcaaagttgttcctctgacctggatatctgggtctgtcatcaatcctggctcgatagcgaagagcgccaattgctacaacgtaaatgtagcctgctggaaaactgggccgcctcgctgggtgtggaagtcagcttcttcctgattgatgaaaaccgcttccgtcataatgaaagcggcagcctggggggcgaagattgtggctccacccagcatatactgctgcttgacgaattttatcgtaccgccgtgcgtctcgccggtaagcgtattctgtggaatatggtgccgtgcgacgaagaagagcattacgacgactatgtgatgacgctttacgcgcagggcgtgctgacgccaaatgaatggctggatctcggtggcttaagctcgctttctgctgaagagtactttggtgccagcctttggcagctctacaagagtatcgattccccatacaaagcggtactgaaaacactgctgctggaagcctattcctgggaatacccgaacccacgtctgctggcgaaagatatcaaacagcgtttgcacgacggcgagattgtatcgtttggtctcgatccatactgcatgatgctggagcgtgttactgaatacctgacggcgattgaagattttacccgtctggatttagtacgtcgctgcttctatttaaaagtgtgcgaaaagctcagccgtgaacgcgcctgcgtaggctggcgtcgcgcagtgttgagccagttagtgagcgagtggggttgggacgaagctcgtctggcaatgctcgataaccgcgctaactggaagattgatcaggtgcgtgaggcgcacaacgagttgctcgacgcgatgatgcagagctaccgtaatctgatccgctttgcgcgtcgcaataaccttagcgtctccgccagtccgcaggatatcggcgtgctgacgcgtaagctgtatgccgcgtttgaagcattaccaggtaaagtgacgctggtaaacccgcagatttcacccgatctctcggaaccgaatctgacctttatttatgtgccgccgggccgggctaaccgttcaggttggtatctgtataaccgcgcgccaaatattgagtcgatcatcagccatcagccgctggaatataaccgttacctgaataaactggtggcgtgggcatggtttaacggcctgctgacctcgcgcacccgtttgtatattaaaggtaacggcattgtcgatttgcctaagttgcaggagatggtcgccgacgtgtcgcaccatttcccgctgcgcttacctgcaccgacaccgaaggcgctctacagcccgtgtgagatccgccatctggcgattatcgttaacctggaatatgacccgacagcggcgttccgcaatcaggtggtgcatttcgatttccgtaagctggatgtcttcagctttggcgagaatcaaaattgcctggtaggtagcgttgacctgctgtaccgcaactcgtggaacgaagtgcgtacgctgcacttcaacggcgagcaatcgatgatcgaagccctgaaaactattctcggcaaaatgcatcaggacgccgcaccgccagatagcgtggaagtcttctgttatagccagcatctgcgcggcttaattcgtactcgcgtgcagcaactggtttctgagtgtattgaattgcgtctttccagcacccgccaggaaaccgggcgtttcaaggcgctgcgcgtttctggtcaaacctgggggttgttcttcgaacgcctgaatgtatcggtacagaaactggaaaacgccatcgagttttatggcgcgatttcgcataacaaactgcacggcctgtcagtgcaggttgaaaccaatcacgtcaaattaccggcggtggtggacggctttgccagcgaagggatcatccagttctttttcgaagaaacgcaagacgagaatggctttaatatctacattctcgacgaaagcaaccgggttgaggtatatcaccactgcgaaggcagcaaagaggagctggtacgtgacgtcagtcgcttctactcgtcatcgcatgaccgttttacctacggctcaagcttcatcaacttcaacctgccgcagttctatcagattgtgaaggttgatggtcgtgaacaggtgattccgttccgcacaaaatctatcggtaacatgccgcctgccaatcaggatcacgatacgccgctattacagcaatatttttcgtgatgaacgtgccggaaagcgaggcttatccggcatgcaatcttagcggaaactgactgtttcacccgcctgctgcgtcgccgcctgttccagcaaatcccagaaggtttcgccgctgcgatcacaaatccactcatcgcctttcaggtcaaaatggtagccgccctgtttggttgccagccatacctggtgcagcggctcctggcggttgataatgattttgctgccattctcaaaggtaatggtcagtacgccgccgttgatttcgcagtcgatatcgctgtcgccatcccagtcgtccaggcgttcttcaatggtcagccagagttgatcagccaggcgatgaaattcactgtcgttcattgttgtatcctgtttttaagtgatggcggcagtatagcggcatggggtcagggcttcaaagtttgcacctctgcggctgcgttccggcacgattcatccgtcaccggaataatgatgtctctgtgtagcgaaagatttgtctcttcattagggcgcagttacaccacgtctttccctgtttctggtaaacattatgatcaggtttaccgagcgagcatcctcacgctgacggaactaaaaaagacaacaaacaaaccacattgcgatagtgcataaagccatcctggcgcgaggtgccgatcacgaaactaccagcaaaacataaatccccacgagtaagcgttatactcgcagcatttcctcacttttcagacttcataaagagtcgctaaacgcttgcttttacgtcttctcctgcgatgatagaaagcagaaagcgatgaactttacaggcaatccataatgaaaaacgtgtttaaggcactcactgtattacttactctcttcagcctgacgggctgcggtctgaaaggtccgctctatttcccgcctgcagataaaaacgcaccgccgccgaccaaaccggtagagacgcaaacgcaatccacggtgccggataaaaacgatcgcgccactggcgatggtccatcccaggtgaattactaaaagtcagtttctgtacccgcgtgattggagtaaatgatgcagttctcgaaaatgcatggccttggcaacgattttatggtcgtcgacgcggtaacgcagaatgtctttttttcaccggagctgattcgtcgcctggctgatcggcacctgggggtagggtttgaccaactgctggtggttgagccgccgtatgatcctgaactggattttcactatcgcattttcaatgctgatggcagtgaagtggcgcagtgcggcaacggtgcgcgctgctttgcccgttttgtgcgtctgaaaggactgaccaataagcgtgatatccgcgtcagcaccgccaacgggcggatggttctgaccgtcaccgatgatgatctggtccgcgtaaatatgggcgaacccaacttcgaaccttccgccgtgccgtttcgcgctaacaaagcggaaaagacctatattatgcgcgccgccgagcagacaatcttatgcggcgtggtgtcgatgggaaatccgcattgcgtgattcaggtcgatgatgtcgataccgcggcggtagaaacgcttggtcctgttctggaaagccacgagcgttttccggagcgcgccaatatcggttttatgcaagtggttaagcgcgagcatattcgtttacgcgtttatgagcgtggggcaggagaaacccaggcctgcggcagcggcgcgtgtgcggcggttgcagtagggattcagcaaggtttgctggccgaagaagtacgcgtggaactccccggcggtcgtcttgatatcgcctggaaaggtccgggtcacccgttatatatgactggcccggcggtacatgtctacgacggatttattcatctatgaagcaaccaggggaagaactgcaggaaacactcacggagcttgatgaccgggcggttgtcgattatctgattaaaaatcctgagttttttatccgtaatgcgcgcgcagtagaagcgatacgtgtgccgcatccggtacgcggcaccgtttcgttggtcgagtggcacatggcccgcgcacgtaatcatattcatgttctggaagagaacatggcgctgttgatggaacaggctatcgccaacgaaggcctgttttatcgcctactctacctgcagcgcagtctcaccgccgccagcagtctcgacgatatgctgatgcgctttcaccgctgggcgcgcgatctcggcctggcaggtgcgagtctgcgcctgtttccggatcgctggcgcttaggtgcgccgtcgaaccacactcatctggcattaagccgtcagtctttcgaaccgctgcgtattcagcgtttggggcaggaacagcactatcttgggccgcttaacggaccagagctgctggtggtgctaccggaagcgaaagcggtgggatcggtggcgatgtcgatgctgggaagcgatgctgatttgggtgtcgtgctgtttaccagtcgcgatgccagtcactatcaacaagggcaaggaacgcagttacttcatgaaattgcgctgatgttgccggagcttctggagcgttggattgaacgcgtatgaccgatttacacaccgatgtagaacgctacctacgttatctgagcgtggagcgccagcttagcccgataaccctgcttaactaccagcgtcagcttgaggcgatcatcaattttgccagcgaaaacggcctgcaaagctggcagcaatgtgatgtgacgatggtgcgcaattttgctgtacgcagtcgccgtaaagggctgggagcagcaagtctggcgttacggctttctgcgctacgtagcttttttgactggctggtcagccagaacgaactcaaagctaacccggcgaaaggtgtttcggcaccgaaagcgccgcgtcatctgccgaaaaacatcgacgtcgacgatatgaatcggctgctggatattgatatcaatgatcccctcgctgtacgcgaccgtgcaatgctggaagtgatgtacggcgcgggtctgcgtctttctgagctggtggggctggatattaaacacctcgacctggagtctggtgaagtgtgggttatggggaaaggcagcaaagagcgccgcctgccgattggtcgcaacgctgtggcgtggattgagcactggcttgatttgcgcgacctgtttggtagcgaagacgacgcgctttttctgtcgaaactgggcaagcgtatctccgcgcgtaatgtgcagaaacgctttgccgaatggggcataaaacaagggctgaataatcacgttcatccgcataaattacgtcactcgttcgccacgcatatgctggagtcgagcggcgatcttcgtggtgtgcaggagctgctgggtcatgccaacctctccaccacgcaaatctatactcatcttgattttcaacaccttgcctcggtgtacgatgcggcgcatccacgcgccaaacgggggaaataatgcgtttttaccggcctttggggcgcatctcggcgctcacctttgacctggatgataccctttacgataaccgtccggtgattttgcgcaccgagcgagaggcgcttacctttgtgcaaaattatcatccggcgctgcgcagcttccagaatgaagatctgcaacgcctgcgccaggcggtacgggaagcggaacccgagatttatcacgacgtgacgcgctggcgttttcgttcgattgaacaagcgatgctcgacgccgggctgagtgccgaagaagccagtgcaggcgcacacgcagcaatgatcaactttgccaaatggcgcagccgaatcgacgtcccgcagcaaactcacgacaccttaaaacagctggcgaagaaatggccgctggtggcgatcaccaacggtaacgcccagccggagctgtttggtttgggggattattttgagtttgtgctgcgcgctggcccgcacgggcgctcaaaaccgttcagcgatatgtactttttggctgcggaaaaactcaacgtgccgatcgacgagatcttacatgttggggacgatctcaccactgacgtgggtggggcaattcgcagcggaatgcaggcttgttggatcagaccggaaaatggcgatctgatgcaaacctgggacagccgtttactgccgcatctggaaatttcccggttggcatctctgacctcgctgatataatcagcaaatctgtatatatacccagctttttggcggagggcgttgcgcttctccgcccaacctatttttacgcggcggtgccaatggacgtttcttacctgctcgacagccttaatgacaaacagcgcgaagcggtggccgcgccacgcagcaaccttctggtgctggcgggcgcgggcagtggtaagacgcgcgtactggtgcatcgtatcgcctggttgatgagcgtggaaaactgctcgccatactcgattatggcggtgacgtttaccaacaaagcggcggcggagatgcgtcatcgtatcgggcaactgatgggcacgagccagggcggtatgtgggtcggcaccttccacgggctggcgcaccgtttgctgcgtgcgcaccatatggacgccaatctgccgcaggatttccagatcctcgacagtgaagaccagctacgcctgcttaagcgtctgatcaaagccatgaacctcgacgagaagcagtggccgccgcggcaggcaatgtggtacatcaacagccagaaagatgaaggcctgcgtccgcatcatattcaaagctacggtaatccggtggagcagacctggcagaaggtgtatcaggcgtatcaggaagcgtgtgaccgcgcgggcctggtggacttcgccgagctgctgctgcgcgctcacgagttgtggcttaacaagccgcatatcctgcaacactaccgcgaacgttttaccaatatcctggtggacgaattccaggataccaacaacattcagtacgcgtggatccgcctgctggcgggcgacaccggcaaagtgatgatcgtcggtgatgacgaccagtcaatctacggctggcgcggggcgcaggtggagaatattcagcgtttccttaatgatttccccggtgccgaaactattcgtctggagcaaaactaccgctctaccagcaatattctgagcgccgctaacgccctgattgaaaacaataacgggcgtctgggtaaaaaactgtggaccgatggcgcggacggtgagcctatttccctctattgcgcttttaacgaactcgatgaagcgcgttttgtggttaaccgcatcaaaacctggcaggacaacggcggagcgcttgccgagtgcgccattctctaccgcagcaacgcccagtcgcgggtgctcgaagaggcgttattgcaggccagtatgccgtaccgtatttacggcgggatgcgcttcttcgaacgccaggaaatcaaagatgcgctctcgtatctgcgcctgattgccaaccgcaacgacgacgcggcctttgagcgtgtggtgaatacgccaacgcggggtattggtgaccggacgctggacgtggtacgtcagacatcgcgcgatcgccagttaacactctggcaggcatgtcgtgagctgttgcaggaaaaagccctcgccgggcgagctgccagcgccttgcagcgatttatggaattaatcgacgccttagcgcaggaaactgccgatatgccgctgcatgtacagactgaccgggtaattaaagactccggcctgcgtaccatgtatgagcaggagaagggcgaaaaaggtcagacgcgtatcgaaaacttagaggaactggtgacggcaacgcgccagttcagctacaacgaagaagacgaagatttaatgccgctgcaggcgttcctctcccatgcggcactggaagcaggtgaagggcaggcggatacctggcaggatgcggtgcagttgatgacgctacactcggcgaaaggcctggagttcccgcaggtgtttatcgttggtatggaagagggcatgttcccaagccagatgtcgctggatgaaggcgggcgtctggaagaagaacgccgtctggcctacgttggcgtaacccgcgcgatgcagaaactgacgctgacctacgcggaaacccgccgtctgtatggtaaagaggtttaccatcgcccgtcgcgctttatcggcgagctgccggaagagtgtgtggaagaggtgcgcctgcgcgccacggtaagccgcccggtcagccatcagcggatgggtacgccgatggtcgagaacgacagcggctacaagctcggccagcgcgtacgccacgctaagtttggtgaaggcaccattgtcaatatggaaggcagcggtgagcatagccgtttgcaggtggcatttcagggccagggtattaaatggctggtggcggcatacgcccggctggagtcggtgtaacgttgccggatgcggtgctgcgcaccttatttggcctaaaaaatcattcagattcaataaattgcaacgtcatgtaggccggatagggcgtttacgccgcatccggcatctgcgccatcttcagtatctgacacaaaactatcgttttaacctttccgctcgacggaaatcatggtgacaaaaggatagcgttgccacgggattgccccgcctttcatatacatatgtgaaatcgtgccatcaagataaagcagctgctcaacgttcagtttcgctttggcataacaggcaaaatcataaaaatttgttgcctgctggctcaacaaaaacacggcgttcccatgtttattaatcccaacaccgttacgaattttgcttgaggcgacgttgggatgaatacgcggattaattacaccgttttccatcaacattggccctgactgcaccgcaaactgaatctctttactggttttgaaggcatccagacgaacgatgccgactttatctcccgcgacataaaacacgccgccaggacggataaagaaattcccttcacctgaagcgagatttaacgccaccttctgctgaccgttttcgatgtacaaaccgagcggcgcatagctttcatcatagatgccgccgttcatcgccatctgcacctgaccctgactattaatatccgccagcagagcatgtaacgttccccacgcttcgccattggctttttgccagtacattttcacccgctctgtttgaggattaacggtatacgcctgtacggtcagcgtcggatctgagagtgcgcaatcatcagcggcaacagcaaacaagggaagtaaggtgagggcgagaaaaatccgtttgagattcaaggtgatcattcctttaccaatgagtagctgatgcgccattataggtcctggatgtgggatttttttatcctgttagcgaccttgacgagtaccaaaaagcgcgaagttcaactattgttctgtggtgttctgttgcgtgttgacggcaaaattttgctggcgtaacatgcgcgcacgatcactctaagaggacattcgccttggacacacccagtagatactggctcactatcctgtcatccaggatcaactcctaaggctatccctttttgctgatagccttagcggttgtcagcgacctcaatttttcccgtcgcgctgagtcaggctgtttaatggtctgaaacccaatttgtttctgtgtgcccaccgaactgtccgatattttaagcattgggagtcccggtcatgctgagcgcatttcaactggaaaataaccgactgacccggctggaagtcgaagagtcacaaccccttgtaaatgcagtatggattgatcttgtcgaaccggacgacgacgagcgactgcgcgtacaatctgaacttggccagagcctggcaacccgcccggaactggaagacatcgaagcatcggcacgtttctttgaagacgacgacggcctgcatattcactccttcttcttctttgaagatgcggaagatcacgccggtaactccactgtggcatttaccatccgtgatggtcgtctgtttactctgcgtgagcgtgaactgcccgcttttcgtctgtatcgtatgcgtgcccgtagccagtcgatggtagacggtaacgcctacgagttgctgctggatctgttcgaaaccaaaatcgaacagttggcagatgaaattgaaaatatctatagcgacctggagcagttgagccgggtgattatggaagggcatcagggcgatgagtacgacgaggcgctctccactctggcggaactggaagatatcggctggaaagttcgcctgtgtctgatggatacccagcgcgcgctcaacttcctggtgcgtaaagcgcgtttaccgggtgggcaactggagcaggcgcgtgaaatcctgcgagatatcgaatccctgctgccgcataacgaatccctgttccagaaggtgaacttcctgatgcaggcggcaatgggttttatcaacatcgagcagaaccgcatcatcaaaatcttctcggtggtatccgtggtattcctgccgccgacgctcgttgcttccagctatggcatgaactttgagtttatgccagaactgaagtggagcttcggctaccctggcgcgattatctttatgatcctcgcgggcctggcaccgtatctgtactttaagcggaagaactggttgtaaaaaacgagagcggtggcttagtctggctaagccacctgttattcaaaggctccaggtatttaacccttttacctctttctcatagaaccatttgttcgtgttaacagcaacataggctgctacggcaattcccagaatgttaacgccaattagtgcaccaacaaatagagatagaataccaagtaatagaactataattgcttttttccataaccccaggacaaataaatatatccaggaacagaagaaagcaatgaaattcatttgaatagttaagcgttgtcttacttttaatgctttaaatgctgctttatattctggtgttgccccccagaatccaggaaaaccatgttgatcataaaaattaaatcggtatttccatttttcacttaatgaaccatcgttcatatattccttactcataaatactccataactattgttttgatgaatcagtaggtgcaagcattagcatactgaaagtggaaaaataacaaatcaaaaaaatcatcgaaccattgcctgaacaggcaaaatcttcggctatcattgtgatgatagagatgatatatactgctaatgtaccaaaaacataagtttttatatagatgaaaccactatcacggagtcgctggcaattcatgttgatgacgagataatggagtacgatggtagagactataacaagaaagcctgcttctccatcgttaaaaaagataataagaaaggcaaaaatgaaatttattaaaataaatgaaaatatataacgacgtctggaaatcttaccgttagatgttgggataaatatacgtaacataaattttacatccttgtatgagtctccggtcagcatggcaatatgcccactctcatgcaagagtcggcatattttttcagaatatatttattttttatttggacgttctacgctgcgtataaatcgcatccatcacaaaaattgccagcgccacccaaataaaggcgaaagtcaccatcttatcggcacccggtttttcaccataaaacgtcacagccagcaggaacatcagcgtcgggccaatgtactggaaaaagcctaacgttgagagacgcaagcgcgtggcagcggcggtaaaacacaacagcggtacggtagtgacaataccggcggcgatcagcagtaaattcagcgacatcgggttttgccccatatggctggttgagctgtcggcaatagcaaacaggtaaattgccgccacgggcagcagccacatggtttcgattaacatgccggtttgcgcttcaacggcaatcttcttgcgtaccagaccgtagaaggcaaaactaaatgccagtcccagcgcgataataggtagcgaaccaaaagtccacagctggactaacacgccacatatcgccagaatcaccgccagccattgcatccggcggaatcgctcgccgaggaaaatcatccccagcacaatgttcaccagcgggttaataaagtaaccaaggctcgcttccagcatatggtgattgttcaccgcccagataaacagtagccagttgccaccaatcagcacggcagagactgccagcataaaaattttctgtggcgtctgaatcagcgtttttaaataggaccactggcggcaaatgctcatcagcaccaccataaagaaaaacgaccagatcacgcgatgcgtcaggatttcatcggcgggcacgtagtaaatcaacttgaagtacgctggcgctataccccaaataaaataagcggcaagagcgagtaatacgccctgccgcgtttgttttgcatccatcgggaatactcatttttaattggtaacagcagtttacctgcttttatgtcttcaacctaccatataggtggcggtggcactggcaatataaagctgttcttcattgtgtaattcaacgcgggcgacggcgactttattgcctgcacgcaacaggctactagtagcagtaaaacgctcgcccctgcctgggcgcagataatcaacgcgaagatcaatggtccccatccgcgatagccgctggcgtagttcatcttcactgatggtttcgtggcgggttaaggtacttcccacgcacaccagaccggcggcgacatccagcgccgacgcaatgaccccgccgtgcaaaatgctttgcgcccagttgcccaccatcattggctgatttttaaaggccagctgtgcgaactctttttcgtaacgctccagttccatccccaatgcgcggttaaatggcatgtgataaacaaacatctcacccactaatttcagggcttgttcagcggtcagtacggcagacatatcatccttacacttcattggttaatgaaatgttgattttatgcttctttgttgttggtttctactttaggaagggataactaacggctatggagttaagtatgtaaaatagcccgcagaaaaatattcaccttatcaataattcgttacggagaacacgaccgatgcggactctgcagggctggttgttgccggtgtttatgttgcctatggcagtatatgcacaagaggcaacggtgaaagaggtgcatgacgcgccagcggtgcgtggcagtattatcgccaatatgctgcaggagcatgacaatccgttcacgctctatccttatgacaccaactacctcatttacacccaaaccagcgatctgaataaagaagcgattgccagttacgactgggcggaaaatgcgcgtaaggatgaagtaaagtttcagttgagcctggcatttccgctgtggcgtgggattttaggcccgaactcggtgttgggtgcgtcttatacgcaaaaatcctggtggcaactgtccaatagcgaagagtcttcaccgtttcgtgaaaccaactacgaaccgcaattgttcctcggttttgccaccgattaccgttttgcaggttggacgctgcgcgatgtggagatggggtataaccacgactctaacgggcgttccgacccgacctcccgcagctggaaccgcctttatactcgcctgatggcagaaaacggtaactggctggtagaagtgaagccgtggtatgtggtgggtaatactgacgataacccggatatcaccaaatatatgggttactaccagcttaaaatcggctatcacctcggtgatgcggtgctcagtgcgaaaggacagtacaactggaacaccggctacggcggcgcggagttaggcttaagttacccgatcaccaaacatgtgcgcctttatactcaggtttacagcggctatggcgaatcgctcatcgactataacttcaaccagacccgtgtcggtgtgggggttatgctaaacgatttgttttgatgaacggttgagtggttggcaaatctggaatccagcatccaggattaccctctcagagactaaaagcattgcagtttctcgcgcaggcgctgaaaatagcgcctgtttttatttcaggcaatcggggtgaatgtggcgcaggcggaagtgttgaatctggagtccggagctaaacaggttttacaagaaacctttggctaccaacagtttcgccccggccaggaagaaattatcgacactgtgctttccggccgcgattgcctcgtcgtcatgcccactggtggcggaaaatccctttgctatcaaatccctgccttattgctaaacggccttaccgtggttgtttcaccgctgatttcgttgatgaaagatcaggtggatcaactgcaagccaacggcgtggcggcggcgtgccttaactcgacgcaaacccgcgaacagcaacttgaagtgatgacaggctgccgcaccgggcaaattcgtctgctttatatcgccccggaacgcctgatgctggataactttcttgagcatctggcgcactggaatccggtgttattagccgttgatgaagcgcactgtatctcccaatggggccacgatttccgcccggaatatgccgcgctcggtcagttgcgccagcggttcccgacgctgccgtttatggcgctgaccgccacagccgacgacaccacgcgccaggatatcgtgcgcctgctggggctgaacgatccgctgattcaaatcagcagttttgaccgtccgaatattcgctacatgctgatggagaagttcaaaccgctcgatcagttgatgcgctacgtgcaggaacagcgcggtaagtcaggcattatctactgcaacagccgcgcgaaagtagaagacaccgctgcgcgcctgcaaagcaagggaattagcgcggcggcctatcatgccgggctggaaaataatgttcgcgccgatgtgcaggaaaaattccagcgcgatgacctgcaaattgtggtggcgacggtggcgttcggcatgggcatcaataaaccaaacgttcgcttcgtggtccactttgatattccgcgcaatatcgaatcctattatcaggaaaccggacgcgccgggcgtgatggcctgcccgcggaagcgatgctgttttacgatccggctgatatggcgtggctgcgccgttgtctggaagagaagccgcaggggcagttgcaggatatcgagcgccacaaactcaatgcgatgggcgcgtttgccgaagcgcaaacttgccgtcgtctggtattgctgaactattttggcgaagggcgtcaggagccgtgcgggaactgcgatatctgcctcgatccgccgaaacagtacgacggttcaaccgatgctcagattgccctttccaccattggtcgtgtgaatcagcggtttgggatgggttatgtggtggaagtgattcgtggtgctaataaccagcgtatccgcgactatggtcatgacaaactgaaagtctatggcatgggccgtgataaaagccatgaacattgggtgagcgtgatccgccagctgattcacctcggcctggtgacgcaaaatattgcccagcattctgccctacaactgacagaggccgcgcgcccggtgctgcgcggcgaatcctctttgcaacttgccgtgccgcgtatcgtggcgctcaaaccgaaagcgatgcagaaatcgttcggcggcaactatgatcgcaaactgttcgccaaattacgcaaactgcgtaaatcgatagccgatgaaagtaatgtcccgccgtacgtggtgtttaacgacgcaaccttgattgagatggctgaacagatgccgatcaccgccagcgaaatgctcagcgttaacggcgttgggatgcgcaagctggaacgctttggcaaaccgtttatggcgctgattcgtgcgcatgttgatggcgatgacgaagagtagtcagcagcataaaaaagtgccagtatgaagactccgtaaacgtttcccccgcgagtcaaatgtatgttgatgttatttctcaccgtcgccatggtgcacattgtggcgcttatgagccccggtcccgatttcttttttgtctctcagaccgctgtcagtcgttcccgtaaagaagcgatgatgggcgtgctgggcattacctgcggcgtaatggtttgggctgggattgcgctgcttggcctgcatttgattatcgaaaaaatggcctggctgcatacgctgattatggtgggcggtggcctgtatctctgctggatgggttaccagatgctacgcggtgcactgaaaaaagaggcggtttctgcacctgcgccacaggtcgagctggcgaaaagtgggcgcagtttcctgaaaggtttactgaccaatctcgctaatccgaaagcgattatctactttggctcggtgttctcattgtttgtcggtgataacgttggcactaccgcgcgctggggcatttttgcgctgatcattgtcgaaacgctggcgtggtttaccgtcgttgccagcctgtttgccctgccgcaaatgcgccgtggttatcaacgtctggcgaagtggattgatggttttgccggggcgttatttgccggatttggcattcatttgattatttcgcggtgatgccagacgcgtcttcagagtaagtcggataaggcgtttacgccgcatccgacattatttttcacgcatgcctcgccgatgctaacagcgctcccaccagcataaacaacgagccgaaaatcttattcagcgccttcatctgctttggtcctttaatccatagagcaatccgttgagcaagggtggcgtaaccgatcatcacaataatatcgaccacaatagtggtgacgccgagcacgatatactgcatcagttgcggctgttgcggcatgatgaattgcggaaatagcgccgccagaaacacaatacttttgggattggtgagattcacaaaaactgcgcgctggaacaaatgtcgacgcgattgagtagaggccagcgatttaaggtcaattgcaccagcggcgcgccactgctggattcccagccaaatcaagtaagccgcgcctgcccacttcaacacttcaaacgcaatcactgagcgggaaaatagcgtccccaaccccacgccaaccagcacaatatgaatcgccagtccggtctgaagcccagcaatagacgccaccgcgccgcgataaccgtggttgagcgaggtggtcatagtgttgattgcaccagagcctggcgacaggcttaaaatgatcgatgtcagcaggtaggcaaaccaccattctaaggtcatgatgaactcccggtgtgtctatttttgtgccacaatacgctactgtcgcagcgttgtgtcaggcacgctaaaaaaaacgattttacgtggtttaagaggcagattacccgatgtttcagcagcaaaaagactgggaaacaagagaaaacgcgtttgctgcttttaccatgggaccgctgactgatttctggcgtcagcgtgatgaagcagagtttactggtgtggatgacattccggtgcgctttgtccgttttcgcgcacagcaccatgaccgggtggtagtcatctgcccggggcgtattgagagctacgtaaaatatgcggaactggcctatgacctgttccatttggggtttgatgtcttaatcatcgaccatcgcgggcagggacgttccggtcgcctgttagccgatccgcatctcgggcatgttaatcgctttaatgattatgttgatgatctggcggcattctggcagcaggaggttcagcccggtccgtggcgtaaacgctatatactggcacattcgatgggcggtgcgatctccacattatttctgcaacgccatccaggtgtatgtgacgccattgcgctaactgcgccaatgtttgggatcgtgattcgtatgccgtcatttatggcacggcagatcctcaactgggccgaagcgcatccacgtttccgtgatggctatgcaataggcaccgggcgctggcgcgcgttgccgtttgctatcaacgtactgacccacagcagacagcgatatcgacgtaacttacgcttctatgctgatgacccaacgattcgcgtcggtgggccgacctaccattgggtacgcgaaagtattctggctggcgaacaggtgttagccggtgcgggtgatgacgccacgccaacgcttctcttgcaggctgaagaggaacgcgtggtggataaccgcatgcatgaccgtttttgtgaactccgcaccgccgcgggccatcctgtcgaaggaggacggccgttggtaattaaaggtgcttaccatgagatcctttttgaaaaggacgcaatgcgctcagtcgcgctccacgccatcgttgattttttcaacaggcataactcacccagcggaaaccgctctacagaggtttaaatttcttatgtaccaggttgttgcgtctgatttagatggcacgttactttctcccgaccatacgttatccccttacgccaaagaaactctgaagctgctcaccgcgcgcggcatcaactttgtgtttgcgaccggtcgtcaccacgttgatgtggggcaaattcgcgataatctggagattaagtcttacatgattacctccaatggtgcgcgcgttcacgatctggatggtaatctgatttttgctcataacctggatcgcgacattgccagcgatctgtttggcgtagtcaacgacaatccggacatcattactaacgtttatcgcgacgacgaatggtttatgaatcgccatcgcccggaagagatgcgcttttttaaagaagcggtgttccaatatgcgctgtatgagcctggattactggagccggaaggcgtcagcaaagtgttcttcacctgcgattcccatgaacaactgctgccgctggagcaggcgattaacgctcgttggggcgatcgcgtcaacgtcagtttctctaccttaacctgtctggaagtgatggcgggcggcgtttcaaaaggccatgcgctggaagcggtggcgaagaaactgggctacagcctgaaggattgtattgcgtttggtgacgggatgaacgacgccgaaatgctgtcgatggcggggaaaggctgcattatgggcagtgcgcaccagcgtctgaaagaccttcatcccgagctggaagtgattggtactaatgccgacgacgcggtgccgcattatctgcgtaaactctatttatcgtaatcgttctttatttggtcagttgtcaacctgatacttcgctacaatggatacccgttaatcaaagagttttccattgtggcgctacttatcatcaccacgattctgtgggccttctcctttagcttttatggcgagtaccttgcggggcacgtcgatagctattttgcggtgctggtgcgcgttggcctggcggcactcgtttttctgccgtttctgcgtacccgtggcaatagcctgaaaacggtcggcctgtatatgctggtgggcgcgatgcagcttggcgtgatgtatatgctgagtttccgcgcttatctctacctgacggtttccgagctgctgctgttcaccgtgctgacgccgctctacatcacgctgatttatgacatcatgagtaagcgccgtctgcgctggggctatgcctttagcgccttgctggcggtgattggtgccgggattattcgctatgatcaggtcaccgaccacttctggactggcttgctgctggtgcaactctccaatatcacttttgccattggcatggtgggttacaaacgcctgatggaaactcgcccgatgccacagcataacgcctttgcgtggttctatcttggcgcgtttctggtggcagtgattgcatggttcttgctgggaaatgcgcagaaaatgccgcaaaccacgctgcaatggggcattctggtgtttcttggcgtggtggcttccgggattggctactttatgtggaactacggcgcgacgcaggtggacgccggaacgctgggcattatgaataatatgcacgttccggcagggctgctggtaaacctggctatctggcaccaacagccgcactggccaacgtttattacaggcgcgctggtgatcctggcctcactgtgggtgcatcgtaagtgggtcgctccgcgctcttcacaaacggcagatgatcgcaggcgtgattgcgcgctgagcgaataaacgcttccgtaactggctgacgctgctcgccatcgcgcacggcggcgtacagtcggctccacaagccttcgcccagggttttggtcaccaccagaccctggcgctcaaaactctctactacccaatgcggtagcgcggcaatacccatccgcgcggcaaccatctgaatcaacaataaggtgttatcgacgcttttcagtgacgggctgacgcctgccggctgaagaaaatgccgccagacatccagtcgactacgctgcaccggataaattaatagcgtctcgctggcgagatcttccggtgtaattcgcgttttcgccgccagtggatggtcaggtgctaacaccagacgcacttcatagtcgaacatcggcgaataatgcaggccactgcgcggcagaatatcggacgtcattaccagatccagctctccctgttgcaaggcgggctgcgggtcaaatgtcacgcccgatttaaaatccatctctacctgcggccagttcttatggaaattttctaacgcgggtgtcagccactgaatacagctatggcactcaatggcaatgcgcagacgcgtctgctgcggttcattgcaggcttgcagggcctggctaatttgcggcagtacctggtttgccagttgcaacaggatttctccctgcggtgtaaagcgtagcggctggctcttacgcacaaatagccggaagccaaggcgttgttccagatcgctaaactggtgagacagggcggattgcgtctgatgcaacgtcgccgcagcggctgcgagcgagccgcagttccgcaacgcttgtagcgttttcaggtgttttacttcgatcatgaaagtccttcacttcggcatgaataatttgcgcttgaggaatatacagtaaccgccaattatggatgtgtaaacatctggacggctaaaatccttcgtcttttaaatttatggtgcgttggctgcgtttctccaccccggtcacttacttcagtaagctcccggggatgaataaacttgccgccttccctaaattcaaaatccataggatttacatataattagaggaagaaaaaatgacaatattgaatcacaccctcggtttccctcgcgttggcctgcgtcgcgagctgaaaaaagcgcaagaaagttattgggcggggaactccacgcgtgaagaactgctggcggtagggcgtgaattgcgtgctcgtcactgggatcaacaaaagcaagcgggtatcgacctgctgccggtgggcgattttgcctggtacgatcatgtactgaccaccagtctgctgctgggtaacgttccggcgcgtcatcagaacaaagatggttcggtagatatcgacaccctgttccgtattggtcgtggacgtgcgccgactggcgaacctgcggcggcagcggaaatgaccaaatggtttaacaccaactatcactacatggtgccggagttcgttaaaggccaacagttcaaactgacctggacgcagctgctggacgaagtggacgaggcgctggcgctgggccacaaggtgaaacctgtgctgctggggccggttacctggctgtggctggggaaagtgaaaggtgaacaatttgaccgcctgagcctgctgaacgacattctgccggtttatcagcaagtgctggcagaactggcgaaacgcggcatcgagtgggtacagattgatgaacccgcgctggtactggaactaccacaggcgtggctggacgcatacaaacccgcttacgacgcgctccagggacaggtgaaactgctgctgaccacctattttgaaggcgtaacgccaaatctcgacacgattactgcgctgcctgttcagggtctgcatgttgacctcgtacatggtaaagatgacgttgctgaactgcacaagcgcctgccttctgactggttgctgtctgcgggtctgatcaatggtcgtaacgtctggcgcgccgatcttaccgagaaatatgcgcaaattaaggacattgtcggcaaacgtgatttgtgggtggcatcttcctgctcgttgctgcacagccccatcgacctgagcgtggaaacgcgtcttgatgcagaagtgaaaagctggtttgccttcgccctacaaaaatgccatgaactggcactgctgcgcgatgcgctgaacagtggtgacacggcagctctggcagagtggagcgccccgattcaggcacgtcgtcactctacccgcgtacataatccggcggtagaaaagcgtctggcggcgatcaccgcccaggacagccagcgtgcgaatgtctatgaagtgcgtgctgaagcccagcgtgcgcgttttaaactgccagcgtggccgaccaccacgattggttccttcccgcaaaccacggaaattcgtaccctgcgtctggatttcaaaaagggcaatctcgacgccaacaactaccgcacgggcattgcggaacatatcaagcaggccattgttgagcaggaacgtttgggactggatgtgctggtacatggcgaggccgagcgtaatgacatggtggaatactttggcgagcacctcgacggatttgtctttacgcaaaacggttgggtacagagctacggttcccgctgcgtgaagccaccgattgtcattggtgacattagccgcccggcaccgattaccgtggagtgggcgaagtatgcgcaatcgctgaccgacaaaccggtgaaagggatgctgacggggccggtgaccatactctgctggtcgttcccgcgtgaagatgtcagccgtgaaaccatcgccaaacagattgcgctggcgctgcgtgatgaagtggccgatctggaagccgctggaattggcatcatccagattgacgaaccggcgctgcgcgaaggtttaccgctgcgtcgtagcgactgggatgcgtatctccagtggggcgtagaggccttccgtatcaacgccgccgtggcgaaagatgacacacaaatccacactcacatgtgttattgcgagttcaacgacatcatggattcgattgcggcgctggacgcagacgtcatcaccatcgaaacctcgcgttccgacatggagttgctggagtcgtttgaagagtttgattatccaaatgaaatcggtcctggcgtctatgacattcactcgccaaacgtaccgagcgtggaatggattgaagccttgctgaagaaagcggcaaaacgcattccggcagagcgcctgtgggtcaacccggactgtggcctgaaaacgcgcggctggccagaaacccgcgcggcactggcgaacatggtgcaggcggcgcagaatttgcgtcgggggtaaaatccaaaccgggtggtaataccacccggtcttttctcattacagcgacttcttcccaccatactgcttaaaccattccagcatacgctgccagccatctttcgcagatgcggcatgatagctcgggcgataatcagcattgaatgcatgcccggcatccgggtacacgataatctctgctttcgcattagcagcccgcagcgcctggcgcatggtttcaacgctctcctgcggaatactgttatccagaccgccatataagccgagaaccggcgcgttaagatcggttgcgatatcaacaggttgtttcggtgaattcagcgacttgtcgcccgtcagtttgccgtaccacgccactgcggcttttagctgtggattatgcgcggcatacagccaggtgatacgtccaccccagcagaatccggtgatcattaaacgatgaacatcgccgccgttgcgggaagcccaactggcgacatgatcgagatcggccagcacctgcgagtcaggcacttttgctaccagaccgctaagcaacgtggggatatcggcaaaatcattcggatcgccttcgcggaagtaaagttcaggtgcgatagccagatacccctccagcgccagacggcgacaaatgtcgcggatatgttcatgcacgccaaaaatttcctgcactacaatgaccactggcagtgggccatcgctttgctttggtctggcatggtaagcaggcatgttatccccttgtgaagggatagaggtgaagcccgccacaatcgcgtcgtccggggtctgaacgatggtcgaagcgagaggcgatgcagcaggtgcaaatccagattgttgtgttgttgccatggtattctccgtacccttataaaaatgttgcgcaatgttaactatagtcagcatgcaacaaatcacattgcctgaatcggctcatcttttatgcagtcctgcagaatgaagagtgatttatgtgatttgaatcacttttggtgggtaaatttatgcaacgcatttgcgtcatggtgatgagtatcacgaaaaaatgttaaacccttcggtaaagtgtctttttgcttcttctgactaaaccgattcacagaggagttgtatatgtccaagtctgatgtttttcatctcggcctcactaaaaacgatttacaaggggctacgcttgccatcgtccctggcgacccggatcgtgtggaaaagatcgccgcgctgatggataagccggttaagctggcatctcaccgcgaattcaccacctggcgtgcagagctggatggtaaacctgttatcgtctgctctaccggtatcggcggcccgtctacctctattgctgttgaagagctggcacagctgggcattcgcaccttcctgcgtatcggtacaacgggcgctattcagccgcatattaatgtgggtgatgtcctggttaccacggcgtctgtccgtctggatggcgcgagcctgcacttcgcaccgctggaattcccggctgtcgctgatttcgaatgtacgactgcgctggttgaagctgcgaaatccattggcgcgacaactcacgttggcgtgacagcttcttctgataccttctacccaggtcaggaacgttacgatacttactctggtcgcgtagttcgtcactttaaaggttctatggaagagtggcaggcgatgggcgtaatgaactatgaaatggaatctgcaaccctgctgaccatgtgtgcaagtcagggcctgcgtgccggtatggtagcgggtgttatcgttaaccgcacccagcaagagatcccgaatgctgagacgatgaaacaaactgaaagccaagcggtgaaaatcgtggtggaagcggcgcgtcgtctgctgtaattctcttctcctgtctgaaggccgacgcgttcggccttttgtatttttgcgtagcgcctcgcaggaaatgcctttccaactggacgtttgtacagcacaattctattttgtgcgggtaagttgttgcgtcaggaggcgttgtggatttctcaatcatggtttacgcagttattgcgttggtgggtgtggcaattggctggctgtttgccagttatcaacatgcgcagcaaaaagccgagcaattagctgaacgtgaagagatggtcgcggagttaagcgcggcaaaacaacaaattacccaaagcgagcactggcgtgcagagtgcgagttactcaataacgaagtgcgcagcctgcaaagtattaacacctctctggaggccgatctgcgtgaagtaaccacgcggatggaagccgcacagcaacatgctgacgataaaattcgccagatgattaacagcgagcagcgcctcagtgagcagtttgaaaacctcgccaaccgtatttttgagcacagcaatcgccgggttgatgagcaaaaccgtcagagtctgaacagcctgttgtcgccgctacgtgaacaactggacggtttccgccgtcaggttcaggacagcttcggtaaagaagcacaagaacgccataccctgacccacgaaattcgcaatctccagcaactcaacgcgcaaatggcccaggaagcgatcaacctgacgcgcgcgctgaaaggcgacaataaaacccagggcaactggggcgaggtagtattgacgcgggtgctggaggcttccggtctgcgtgaagggtatgaatatgaaacccaggtcagcatcgaaaatgacgcccgctcgcggatgcagccggatgtcatcgtgcgcctgccgcagggaaaagatgtggtgatcgacgccaaaatgacgctggtcgcctatgaacgctattttaacgccgaagacgactacacccgcgaaagcgcgctacaggaacatatcgcgtcggtgcgtaaccatatccgtttgctgggacgcaaagattatcaacagctgccggggctgcgaactctggattacgtgctgatgtttattcccgttgaacccgcttttttactggcgcttgaccgccagccggagctgatcaccgaagcgttgaaaaacaacatcatgctggttagcccgactacgctgctggtggcgctgcgcactatcgccaacctgtggcgttatgagcatcaaagccgcaacgcccagcaaatcgccgatcgtgccagcaagctgtacgacaagatgcgtttgttcatcgatgacatgtccgcgattggtcaaagtctcgacaaagcgcaggataattatcggcaggcaatgaaaaaactctcttcagggcgcggaaatgtgctggcgcaggcagaagcgtttcgcggtttaggagtagaaattaaacgcgagattaatccggatttggctgaacaggcggtgagccaggatgaagagtatcgacttcggtcggttccggagcagccgaatgatgaagcttatcaacgcgatgatgaatataatcagcagtcgcgctagcccattgggagtagttaagccgggtagaaatctagggcatcgacgcccaatctgttacacttctggaacaattttttgatgagcaggcattgagatggtggataagtcacaagaaacgacgcactttggttttcagaccgtcgcgaaggaacaaaaagcggatatggtcgcccacgttttccattccgtggcatcaaaatacgatgtcatgaatgatttgatgtcatttggtattcatcgtttgtggaagcgattcacgattgattgcagcggcgtacgccgtgggcagaccgtgctggatctggctggtggcaccggcgacctgacagcgaaattctcccgcctggtcggagaaactggcaaagtggtccttgctgatatcaatgaatccatgctcaaaatgggccgcgagaagctgcgtaatatcggtgtgattggcaacgttgagtatgttcaggcgaacgctgaggcgctgccgttcccggataacacctttgattgcatcaccatttcgtttggtctgcgtaacgtcaccgacaaagataaagcactgcgttcaatgtatcgcgtgctgaaacccggcggccgcctgctggtgcttgagttctcgaagccaattatcgagccgctgagcaaagcctatgatgcatactccttccatgtgctgccgcgtattggctcactggtcgcgaacgacgccgacagctaccgttatctggcagaatccatccgtatgcatcccgatcaggataccctgaaagccatgatgcaggatgccggattcgaaagtgtcgactactacaatctgacggcaggggttgtggcgctgcatcgtggttataagttctgacaggagaccggaaatgccttttaaacctttagtgacggcaggaattgaaagtctgctcaacaccttcctgtatcgctcacccgcgctgaaaacggcccgctcgcgtctgctgggtaaagtattgcgcgtggaggtaaaaggcttttcgacgtcattgattctggtgttcagcgaacgccaggttgatgtactgggcgaatgggcaggcgatgctgactgcaccgttatcgcctacgccagtgtgttgccgaaacttcgcgatcgccagcagcttaccgcactgattcgcagtggtgagctggaagtgcagggcgatattcaggtggtgcaaaacttcgttgcgctggcagatctggcagagttcgaccctgcggaactgctggccccttataccggtgatatcgccgctgaaggaatcagcaaagccatgcgcggaggcgcaaagttcctgcatcacggcattaagcgccagcaacgttatgtggcggaagccattactgaagagtggcgtatggcacccggtccgcttgaagtggcctggtttgcggaagagacggctgccgtcgagcgtgctgttgatgccctgaccaaacggctggaaaaactggaggctaaatgacgccaggtgaagtacggcgcctatatttcatcattcgcacttttttaagctacggacttgatgaactgatccccaaaatgcgtatcaccctgccgctacggctatggcgatactcattattctggatgccaaatcggcataaagacaaacttttaggtgagcgactacgactggccctgcaagaactggggccggtttggatcaagttcgggcaaatgttatcaacccgccgcgatctttttccaccgcatattgccgatcagctggcgttattgcaggacaaagttgctccgtttgatggcaagctggcgaagcagcagattgaagctgcaatgggcggcttgccggtagaagcgtggtttgacgattttgaaatcaagccgctggcttctgcttctatcgcccaggttcataccgcgcgattgaaatcgaatggtaaagaggtggtgattaaagtcatccgcccggatattttgccggtcattaaagcggatctgaaacttatctaccgtctggctcgctgggtgccgcgtttgctgccggatggtcgccgtctgcgcccaaccgaagtggtgcgcgagtacgaaaagaccttgattgatgaactgaatttgctgcgggaatctgccaatgccattcagcttcggcgcaattttgaagacagcccgatgctctacatcccggaagtttaccctgactattgtagtgaagggatgatggtgatggagcgcatttacggcattccggtgtctgatgttgcggcgctggagaaaaacggcactaacatgaaattgctggcggaacgcggcgtgcaggtgttcttcactcaggttttccgtgacagctttttccatgccgatatgcaccctggcaacatcttcgtaagctatgaacacccggaaaacccgaaatatatcggcattgattgcgggattgttggctcgctaaacaaagaagataaacgctatctggcagaaaactttatcgccttctttaatcgcgactatcgcaaagtggcagagctacacgtcgattcaggctgggtgccaccagataccaacgttgaagagttcgaatttgccattcgtacggtctgtgaacctatctttgagaaaccgctggccgaaatttcgtttggacatgtactgttaaatctgtttaatacggcgcgtcgcttcaatatggaagtgcagccgcaactggtgttactccagaaaaccctgctctatgtcgaaggggtaggacgccagctttatccgcagctcgatttatggaaaacagcgaagcctttcctggagtcgtggattaaagatcaggtcggtattcctgcgctggtgagagcatttaaagaaaaagcgccgttctgggtcgaaaaaatgccagaactgcctgaattggtttacgacagtttgcgccagggcaagtatttacagcacagtgttgataagattgcccgcgagcttcagtcaaatcatgtacgtcagggacaatcgcgttattttctcggaattggcgctacgttagtattaagtggcacattcttgttggtcagccgacctgaatgggggctgatgcccggctggttaatggcaggtggtctgatcgcctggtttgtcggttggcgcaaaacacgctgattttttcatcgctcaaggcgggccgtgtaacgtataatgcggctttgtttaatcatcatctaccacagaggaacatgtatgggtggtatcagtatttggcagttattgattattgccgtcatcgttgtactgctttttggcaccaaaaagctcggctccatcggttccgatcttggtgcgtcgatcaaaggctttaaaaaagcaatgagcgatgatgaaccaaagcaggctaaaaccagtcaggatgctgattttactgcgaaaactatcgccgataagcaggcggatacgaatcaggaacaggctaaaacagaagacgcgaagcgccacgataaagagcaggtgtaatccgtgtttgatatcggttttagcgaactgctattggtgttcatcatcggcctcgtcgttctggggccgcaacgactgcctgtggcggtaaaaacggtagcgggctggattcgcgcgttgcgttcactggcgacaacggtgcagaacgaactgacccaggagttaaaactccaggagtttcaggacagtctgaaaaaggttgaaaaggcgagcctcactaacctgacacccgaactgaaagcgtcgatggatgaactacgccaggccgcggagtcgatgaagcgttcctacgttgcaaacgatcctgaaaaggcgagcgatgaagcgcacaccatccataacccggtggtgaaagataatgaagctgcgcatgagggcgtaacgcctgccgctgcacaaacgcaggccagttcgccggaacagaagccagaaaccacgccagagccggtggtaaaacctgctgcggacgctgaaccgaaaaccgctgcaccttccccttcgtcgagtgataaaccgtaaacatgtctgtagaagatactcaaccgcttatcacgcatctgattgagctgcgtaagcgtctgctgaactgcattatcgcggtgatcgtgatattcctgtgtctggtctatttcgccaatgacatctatcacctggtatccgcgccattgatcaagcagttgccgcaaggttcaacgatgatcgccaccgacgtggcctcgccgttctttacgccgatcaagctgacctttatggtgtcgctgattctgtcagcgccggtgattctctatcaggtgtgggcatttatcgccccagcgctgtataagcatgaacgtcgcctggtggtgccgctgctggtttccagctctctgctgttttatatcggcatggcgttcgcctactttgtggtctttccgctggcatttggcttccttgccaataccgcgccggaaggggtgcaggtatccaccgacatcgccagctatttaagcttcgttatggcgctgtttatggcgtttggtgtctcctttgaagtgccggtggcaattgtgctgctgtgctggatggggattacctcgccagaagacttacgcaaaaaacgcccgtatgtgctggttggtgcattcgttgtcgggatgttgctgacgccgccggatgtcttctcgcaaacgctgttggcgatcccgatgtactgtctgtttgaaatcggtgtcttcttctcacgcttttacgttggtaaagggcgaaatcgggaagaggaaaacgacgctgaagcagaaagcgaaaaaactgaagaataaattcaaccgcccgtcagggcggttgtcatatggagtacaggatgtttgatatcggcgttaatttgaccagttcgcaatttgcgaaagaccgtgatgatgttgtagcgcgcgcttttgacgcgggagttaatgggctactcatcaccggcactaacctgcgtgaaagccagcaggcgcaaaagctggcgcgtcagtattcgtcctgttggtcaacggcgggcgtacatcctcacgacagcagccagtggcaagctgcgactgaagaagcgattattgagctggccgcgcagccagaagtggtggcgattggtgaatgtggtctcgactttaaccgcaacttttcgacgccggaagagcaggaacgcgcttttgttgcccagctacgcattgccgcagatttaaacatgccggtatttatgcactgtcgcgatgcccacgagcggtttatgacattgctggagccgtggctggataaactgcctggtgcggttcttcattgctttaccggcacacgcgaagagatgcaggcgtgcgtggcgcatggaatttatatcggcattaccggttgggtttgcgatgaacgacgcggactggagctgcgggaacttttgccgttgattccggcggaaaaattactgatcgaaactgatgcgccgtatctgctccctcgcgatctcacgccaaagccatcatcccggcgcaacgagccagcccatctgccccatattttgcaacgtattgcgcactggcgtggagaagatgccgcatggctggctgccaccacggatgctaatgtcaaaacactgtttgggattgcgttttagagtttgcggaactcggtgttcttcacactgtgcttaatctctttattaataagattaagcaatagcatggagcgagcctcaccatcgggttcggtgaaaatggcctgaaagccttcgaacgcgccttcggtaataatcaccttatctcccggataaggggttgccggatcgacaatgtctttcggtttatataccgatagctgatgaatcaccgccgatgggactatcgctggcgacgcgccaaagcgcacgaagtgactgacaccgcgggtcgcgttgatagtcgtggtatgaatcacttctggatcaaattcgacaaacaggtagttgggaaacaatggctcactgactgcagtacgttttccacgcacgattttttccagggtgatcatcggtgccaggcaattcacagcctgtctttcgaggtgttcctgggcacgttgaagttgcccgcgcttgcagtacagtaaataccaggattgcataatgactcttatccgtttaatcggggcgcaaggatagcaaaagctttacgctaagttaattatattccccggtttgcgttataccgtcagagttcacgctaatttaacaaatttacagcatcgcaaagatgaacgccgtataatgggcgcagattaagaggctacaatggacgccatgaaatataacgatttacgcgacttcttgacgctgcttgaacagcagggtgagctaaaacgtatcacgctcccggtggatccgcatctggaaatcactgaaattgctgaccgcactttgcgtgccggtgggcctgcgctgttgttcgaaaaccctaaaggctactcaatgccggtgctgtgcaacctgttcggtacgccaaagcgcgtggcgatgggcatggggcaggaagatgtttcggcgctgcgtgaagttggtaaattattggcgtttctgaaagagccggagccgccaaaaggtttccgcgacctgtttgataaactgccgcagtttaagcaagtattgaacatgccgacaaagcggctgcgtggtgcgccctgccaacaaaaaatcgtctctggcgatgacgtcgatctcaatcgcattcccattatgacctgctggccggaagatgccgcgccgctgattacctgggggctgacagtgacgcgcggcccacataaagagcggcagaatctgggcatttatcgccagcagctgattggtaaaaacaaactgattatgcgctggctgtcgcatcgcggcggcgcgctggattatcaggagtggtgtgcggcgcatccgggcgaacgtttcccggtttctgtggcgctgggtgccgatcccgccacgattctcggtgcagtcactcccgttccggatacgctttcagagtatgcgtttgccggattgctacgtggcaccaagaccgaagtggtgaagtgtatctccaatgatcttgaagtgcccgccagtgcggagattgtgctggaagggtatatcgaacaaggcgaaactgcgccggaagggccgtatggcgaccacaccggttactataatgaagtcgatagtttcccggtatttaccgtgacgcatattacccagcgtgaagatgcgatttaccattccacctataccgggcgtccgccagatgagcccgcggtgctgggtgtcgcactgaacgaagtgtttgtgccgattctgcaaaaacagttcccggaaattgtcgatttttacctgccgccggaaggctgctcttatcgcctggcggtagtgacaatcaaaaaacagtacgccggacacgcgaagcgcgtcatgatgggcgtctggtcgttcttacgccagtttatgtacactaaatttgtgatcgtttgcgatgatgacgttaacgcacgcgactggaacgatgtgatttgggcgattaccacccgtatggacccggcgcgggatactgttctggtagaaaatacgcctattgattatctggattttgcctcgcctgtctccgggctgggttcaaaaatggggctggatgccacgaataaatggccgggggaaacccagcgtgaatggggacgtcccatcaaaaaagatccagatgttgtcgcgcatattgacgccatctgggatgaactggctatttttaacaacggtaaaagcgcctgatgcgcgtttgttttgccctatttatcgatccgacagagaaagcgcatgacaaccttaagctgtaaagtgacctcggtagaagctatcacggataccgtatatcgtgtccgcatcgtgccagacgcggccttttcttttcgtgctggtcagtatttgatggtagtgatggatgagcgcgacaaacgtccgttctcaatggcttcgacgccggatgaaaaagggtttatcgagctgcatattggcgcttctgaaatcaacctttacgcgaaagcagtcatggaccgcatcctcaaagatcatcaaatcgtggtcgacattccccacggagaagcgtggctgcgcgatgatgaagagcgtccgatgattttgattgcgggcggcaccgggttctcttatgcccgctcgattttgctgacagcgttggcgcgtaacccaaaccgtgatatcaccatttactggggcgggcgtgaagagcagcatctgtatgatctctgcgagcttgaggcgctttcgttgaagcatcctggtctgcaagtggtgccggtggttgaacaaccggaagcgggctggcgtgggcgtactggcaccgtgttaacggcggtattgcaggatcacggtacgctggcagagcatgatatctatattgccggacgttttgagatggcgaaaattgcccgcgatctgttttgcagtgagcgtaatgcgcgggaagatcgcctgtttggcgatgcgtttgcatttatctgagatataaaaaaacccgcccctgacaggcgggaagaacggcaactaaactgttattcagtggcatttagatctatgacgtatctggcaaaccatgcccgatgcgacgctgtcgcgtcttatcgtgcctacaaatagtccgaaccgtaggccggataaggcgtttacgccgcatccggcaattggtgcatgatgcctgatgcgacgctggcgcgtcttatcaggcctacattggtgccggatcggtagaccggataaggcgttcacgccgcatccggcaagtggttaaacccgctcaaacaccgtcgcaataccctgacccagaccgatacacatcatcgccagaccaaactgaacgtctttgcgttccatcagattcagcagcgtggtgctgatacgcgcaccggaacaacccagcggatgacccagcgcgatcgcgccaccgttgaggttgatcttctcgtcaatctgctcaattagtcccagatctttaatacatggcaggatctgcgcggcaaaggcttcgttcatttcaaacacgccgatatcgctggcagaaagccccgcttttttcagcgccagtttcgaggccggaaccgggccgtaacccataatcgatgggtcacaaccaacgaccgccatcgaacgcacacgagcgcgcggcttaagacctaattcatgggcgcggctttcactcatcaccagcatggcagctgcgccatcggaaagtgcagaagatgtgcccgccgttaccataccgtttactggatcaaacgccggacgcagcgtggcgagggcttccacggtggtttccgggcgaatcacttcgtcgtaattaaactgcttcaggacgccgtcggcatcgtgaccaccggtcgggatgatttcatttttaaatgcggccgactgcgtggcggcccaggcgcgggcgtgtgaccgcgcggcaaaggcatcctgcatttcacggctgataccgtgcatacgcgccagcatttctgccgttaagcccatcatgcccgccgctttggcgacattgcggctcaggccggggtgaaaatcgacgccgtgactcatcggcacatggcccatatgctccacgccgccaaccagacatgcctgcgcatcgccagtcatgatcattcgtgctgcgtcatgcagtgcctgcatggatgaaccacacaagcgattgacggtaaccgccgggacagagtgcggcacttctgccagcagcgccgcgttacgggcgatgttaaaaccctgctccagcgtctgctgcacacaaccccagtaaatatcgtcgagggccgccgcttccagcgccgggttacgcgccagcaggctacgcattaaatgagcggagagatcttccgcacgcacgttacgaaaagcaccgcccttcgaacggcccatcggggtgcgaattgcatcgacaatgacaacctgttccattgtgactccttaagccgttttcaggtcgccaaccggacgggctggctcaaccggaggatagtacggttcgttatgacgcgctttattacgcagaccttccggcacttcatacagcgggccgaggtgctgatattgctgtgccatatcgaggtattttgcgctaccgagggtgtccagccagcggaacgcgccgccgtggaacggagggaagcccaggccgtagaccagcgccatatccgcttctgccggagtggcgataatgctttcttccagacagcgcaccacttcgttgaccatcgggatcatcatgcgggcgataatctcttcttcgctgaaatcgcgcttcggctggctcacttctgccagcaggtcgtcaacgacggcgtcttcttctttcttcggcttacctttgctgtcttctttataacgccagaaaccgaggccgttcttctgaccaaagcggttggcatcaaacagcgcgtcgatggtatcgcgataatctttctgcatccgctgcgggaagcctgctgccatgacagcctgggcatgatgcgcggtgtcaatgcccacgacatccagcagatatgccggacccatcggccagccaaactgtttttccattactttgtcgatcttgcggaaatccgcgccgtcgcgcagcaactggctgaaaccggcgaaatacgggaacagcacgcggttgacgaagaagccggggcagtcgttaaccacaatcggcgttttgcccatcttgctcgcccaggcgacgactttcgcgatggtttcgtcggagcttttctcgccgcgaataatttccaccaacggcattcggtggaccgggttaaagaagtgcatcccgcagaagttttccggacgttccagcgcgttggccagttcgctgataggaatggttgaagtgttagacgccagcacggtatccgggcgtactttttgttcggtttctgccagtacggcttttttcactttcggattttcgacaaccgcttctaccacaacatccacgcggtcaaatccggcgtagtcgagcgttgggtggattgtggagatcacgccagccagtttcagaccatcgatcttgccgcgctcaagctgcttgttcagcagtttcgcagcttcggtcatgccgagggttaacgacttgtcgttgatatctttcatgataaccggcacgcctttccacgcagactggtaagcgatgccgccgcccatgatgcctgcgcccagcacagcggcctgtttcggtgtttcaatgtctttggtgagtttcttcgctttgccttttacatattgatcgttaaggaaaatgccgaccagtgcgcgggcttcgttggtgtgcgccagcgggacaaaacttttgttttccagatttaatgcttcttcacgaccaaaacgggccgcagcttcaatggtttttactgcggtgatgggggccggataatgtttccccgccgtttgcgcgaccatccctttagcgatggtgaagctcatggtagcttcaatcttgctcagttttagcggttccagcttcggctgacgttttgctttccagtcgaggtcaccgttaatggcctggcgtaaaatcgccttcgcgccttcaaccagtttttctgctttgactacgccatccaccagaccgattttcagcgcctgatccgcgccgacatctttaccggcagcaatgatttccagcgcactgtcagcgcccagcatacgtggcatacgtacagaaccgccaaagcccggcatgatgcccagtttggtttccggcagaccgatgcgcagatccggcgtcgccagacgataatcggtcgccagcacgcattcgcagccaccgcccagcgcatagccgttgacggcagcaatggtcggcaccggcagatcttccaggcgattaaacacgctattggcaaagtgcagccactgacttaactgttcttcaggaacgaggaacagggacaaaaattcggtgatatcagcaccgacgataaaggctgctttgttcgaacgcagcagcagcccttttagatctgattgctgttccagcacgccgatggcctcgccgaggctggcgacggtcgcagtgtcgagtttattaactgaacctggggcatcaaataccagttcggcaatgccatcttccagccagtcaaggtacagggtgtcgcctttgtaaagcatgtcagtctcctgaatccgcaaggtgatctggtcgtaccagatgagtcgaagtgtgtattttgtgttaaaaatatgcaaacaaaagattaaagaaatgccgatctgatcacgctcggcagaaatcacgctctggatgaacgatgtgctaagatgcggagacttaaggtcaaaaaaacagaagggtaaaaaatggaatcactggcctcgctctataaaaatcatatagctaccttacaagaacggactcgcgatgcgctggcgcgcttcaagctggatgcgttacttattcactccggcgagctgttcaatgtttttctcgacgatcatccctatccgtttaaagtgaacccgcaattcaaagcgtgggtgccggtaactcaggtgccaaactgctggttgctggtggatggcgtgaataagccgaaactgtggttctatctgccggttgattactggcacaacgtcgaaccgctgccgacctccttctggactgaagatgtagaagtgatcgcgctgccaaaagccgatggcattggtagtctgttgcctgctgcgcgcggcaatatcggttatatcggtccggtgccggaacgtgcgctgcaactgggtattgaggccagcaacatcaacccgaaaggggtgatcgactacctgcattactaccgctccttcaaaaccgagtacgaactggcctgtatgcgtgaagcgcagaaaatggcggtcaacggtcatcgtgcggcagaagaagcgttccgttctggcatgagcgagttcgatatcaatattgcctatctgaccgcgaccggtcatcgtgataccgacgtaccttacagcaacattgtggcgcttaacgaacacgctgcggtgttgcattacaccaaactggaccaccaggcaccggaagagatgcgcagcttcctgctggatgccggggccgaatataacggctatgcggctgacctgacccgtacctggtcggcaaaaagcgacaacgactacgcacagctggtgaaagacgtaaatgatgaacaactggcgctgatcgctaccatgaaagcaggcgttagctatgtggattaccacatccagttccatcagcgcatcgccaaactgctgcgtaaacatcaaatcatcaccgatatgagtgaagaagcgatggtcgaaaacgatctcaccggaccgtttatgccgcacggtatcggccatccgctgggcctgcaggtgcatgacgtcgccggttttatgcaggatgatagcggtacgcacctcgcggcaccggcaaaatatccgtacctgcgctgcacccgtattctccagccgggcatggtgttaaccattgaaccgggtatctacttcatcgaatcgctgctggcaccgtggcgtgaagggcagttcagcaagcacttcaactggcagaaaattgaagcactgaaaccgttcggcggcattcgtatcgaagacaacgtggtgatccacgaaaataacgtggaaaacatgacccgggatctgaaactggcgtgatggaaagctggttaattcctgcggcaccggtcacggtcgttgaagagatcaaaaaaagccgcttcataacgatgttggcgcataccgatggcgttgaggcggcgaaagcgtttgttgaatcggtgcgggcagaacaccccgatgcccgccaccattgcgtggcgtgggtggcgggtgcgccggatgattctcaacagctgggtttctctgacgacggggagccggcgggaacggcaggtaaaccgatgctcgcccagctaatgggcagcggcgtcggggaaattaccgctgtggtagtgcgctactacggcggcatattgcttggcaccggtgggttagtgaaagcgtatggcggcggcgtgaatcaggcgctgcgccagctaacgacccaacgcaagacgccattaaccgaatatactttgcaatgtgaatatagtcagttaaccggcattgaagcgttgctggggcagtgtgacggcaaaattatcaacagtgattatcaggcattcgttctgctgcgggtggcgcttccggcggcgaaagtggctgaattttccgcaaagctggcggattttagccgtggttcattgcaattgttagcgattgaagaataatccccacttcgttttgcagaactaaggaagcggcagagatgcattttcgcgccattacccgaatcgttggactactggtcatcttattttcagggaccatgattatccctgggctggtagcactcatctaccgggatggagcgggccgcgcttttacccagaccttttttgtcgccctcgccattggctctatgctgtggtggccgaaccgcaaagagaagggcgaactgaaatcccgtgaggggtttctgatagtggtgctgttctggaccgtgctgggtagtgtcggtgcgctcccttttatcttctcggaaagcccgaacctcacgattaccgatgcgttttttgaatctttctctggcctgaccaccaccggggccactacgctggtggggctggattcgctccctcatgccatcctcttttatcgccagatgctgcaatggtttggcgggatggggatcatcgtgttggcggttgcgatactgcctatcctcggcgtgggtgggatgcagctctatcgcgcagaaatgcccggcccgctgaaagataacaaaatgcgcccgcgaattgcggaaacggcgaaaaccctgtggttgatttatgtcttgctgaccgtcgcctgtgcgctggcgttgtggtttgccggaatggatgcctttgatgccatcggccatagctttgcgactatcgctattggcggcttctcgacacatgatgccagtatcggttatttcgacagcccgactattaacactatcattgctatcttcctgctgatctccggctgtaactacggtctgcacttttcactgttaagtgggcgtagtctgaaggtttattggcgcgatccggaatttcgcatgtttatcggcgtacagtttacgctggtggttatttgtacactcgtactgtggtttcataatgtctacagttcggcgctgatgacaattaaccaggcgtttttccaggtggtatcgatggcgacaaccgccgggtttacgactgacagcattgcccgctggccgctctttttgccggtactgcttttatgttcagcttttatcggcggttgcgccgggtcaacgggcggtggcctgaaagtgatccgcatcctgctgctgtttaagcaggggaaccgtgagctgaaacgactggtgcatccgaacgccgtctatagcattaagctggggaatcgcgcactgccggaacgtatcctcgaagccgtttggggatttttctccgcctatgcattggtgtttattgtcagtatgctggcgattatcgccacgggcgtggatgacttttctgcctttgcctcagttgttgcgacattgaataacctggggccagggcttggcgtggttgctgataactttaccagtatgaacccggtggctaaatggatcctgattgccaacatgctgtttggtcgtcttgaggtctttacattgctggtgctctttaccccgactttctggcgtgaatgatggagtaatacgtgaaaacattaattcttttctcaacaagggacggacaaacgcgcgagattgcctcctacctggcttcggaactgaaagaactggggatccagacggatgtcgccaatgtgcaccgcattgaagaaccacaatgggaaaactatgaccgtgtggtcattggtgcttctattcgctatggtcactaccactctgcgttccaggaatttgtcaaaaaacatgcgacgcgactgaattcgatgccgagcgccttttattccgtaaacctggtggcgcgcaaaccggagaagcgtactccacagaccaacagctacgcgcggaagtttctgatgaactcgcaatggcgtcccgatcgctgcgcggtcattgccggggcgctgcgttacccacgttatcgctggtatgaccgttttatgatcaagctgattatgaagatgtcaggcggtgaaacggatacgcgcaaagaagttgtctataccgattgggagcaggtggcgaatttcgcccgagaaatcgcccatttaaccgacaaaccgacgctgaaataagcataaagaataaaaaatgcgcggtcagaaaattattttaaatttcctcttgtcagaccggaataactccctataatgcgccaccactgacacggaacaacggcaaacacgctggagcacctcaaaaacaccatcatacactaaatcagtaagttggcagcatcaccaattcgccgaatatggttacgaaggggccagagtcgataatattgtcaaggccgctgagtgcagtaaacagacggtttatcaccactttggtaataaagaaaatttatttatcgaagtactggaatatacctggaacgatattcgacaaaaagaaaaggcccttgatttctcagatcttccgccacagaaagccattgagaaaataatcgattttacatgggattattatatttctaatccctggtttttaaaaattgtgcatagtgaaaaccaaagtaaaggtgtgcattatgcaaaatcacagcgtctcttggaaattaatcatgcgcacttgcagttaatggaatccttattggatgaagggaagaaacacaatatttttaagccagatatcgacccattgcaggtgaatattaatattgctgcgcttgggggatattatttgatcaaccagcatacgcttggcctggtttatcacatcagtatggtttcaccccaggcactggaagccagacgtaaggtcatcaaagagacaatccttagctggcttttggttgacccttcatctaccgcgcacgaataaaactgccatccggctggcgggtaaacaggacctgttgattattccccgtatcaatggttaagcccgtcaccacgccgctggcgttctggcggattttcaccatctgcccgttttgcaaattactcagcggcttacccgcgccttctacctgcgccattgcatagacatcggtagcgggcagtccgtggtcgcggaacagctgcgccatcgttttaccgggttcgacacgataggagcgccattgattatcaattccgctatctggctggaatggttgcgtttgggtggtttgcggctgctcttctggctggccttcctgtattggttctggagcgaccggggccacctgatcaggatcattttgtggcgtaactagctgcgcccgcagctgttcttctgtcggcggttgtgattgcgactgaatatctaactgcgcttcacgcgtcaccactggcgcgttgggcgtatcatcagatggaagcagaaatccgaccaccaatacaatggcggcaataatgatcccccgacgatgcatcggcggcagcgggtccatgaagcgaaaattgtccggcgcgtgccagactttctccagggttggttttagttcaaagcgcccgggcatggtttcctcctgctccgcgtcttgttcctcaatcatagcctatgaataagctaacgctatgatgtccgtggtaaacccgcctttattatattcatacgggatattgctattgtttctttttccccgtgatttgtcatcattcccgcgacaaagttttacccaaagaagtgtggctgatatgctgcccgctactttataccctaagaaaggaaatacgatgaccaccccaacttttgacaccatcgaagcgcaagcaagctacggcattggtttgcaggtagggcaacaactgagtgaatctggcctggaagggctgctgccagaagcactggttgcaggcattgctgatgcgctggaaggcaaacatccggctgttccggttgatgtggtgcaccgcgcgctgcgtgaaatccacgaacgcgccgatgccgttcgtcgtcagcgtttccaggcgatggctgctgaaggtgtgaaatacctggaagaaaacgccaaaaaagaaggtgtgaatagcaccgaatctggcctgcaattccgcgtgatcaaccagggcgaaggcgcaattccggcacgtaccgaccgcgttcgtgttcattacaccggaaaactgatcgacggcaccgtgtttgacagctccgttgctcgcggcgagccagctgaattcccggttaacggcgtgatcccaggctggattgaagcgctgactctgatgccggtaggttctaaatgggaactgactatcccgcaggaactggcatatggtgagcgtggcgcaggcgcgtccatccctccgttcagcaccctggtgtttgaagtcgaactgctggaaatcctctaagcagcgcattctgttcccctcgagccagaggggagcaggcattcagcaataaacccttcagtttgccaaacggcgctattttgtgttgcaaagaccccgtaagcgtgtatttttgtgagctgtttcgcgttatcaccgtgatatgacactcactttaaacataaaattaacattagatctaaatcttagtattcatcccgcgtattgttacctaatatcgatgagtcccgatacagattcgtcgtatcatagactgactaaaggccgtagagcctgaacaacacagacaggtacaggaagaaaaaaacatggtagatcaggtaaaagtcgttgccgatgatcaggctccggctgaacagtcgctacggcgcaatctcacaaaccgacatatccagcttattgccattggtggggccattggtacggggctgtttatggggtccggtaaaacaatcagtcttgccggaccgtcgatcatttttgtttatatgatcattggttttatgctctttttcgtgatgcgggcaatgggggaattgctgctttcgaatctggaatacaaatcttttagtgacttcgcttccgatttactcgggccgtgggcaggatatttcaccggctggacttactggttctgctgggttgtaaccggtatggcagacgtggtggcgatcacggcttatgctcagttctggttccccgatctctccgactgggtcgcctcgctggcggtgatagtgctgctgctgacgcttaacctcgccaccgtgaaaatgttcggtgagatggagttctggtttgcgatgatcaaaattgtcgccattgtgtcgctgatagtcgtaggcctggtcatggtggcgatgcactttcagtcaccgaccggtgtggaagcgtcattcgcgcatttgtggaatgatggcggctggttcccgaaaggtttaagtggcttctttgccggattccagatagcggttttcgctttcgtagggattgagctggtaggtacaacagctgcggaaaccaaagatccagagaaatcactgccacgcgcgattaactccattccgatccgtatcattatgttctacgtcttcgcgctgattgtgattatgtccgtgacgccgtggagttcggtagtcccggagaaaagtccgttcgttgaactgtttgtgttggtaggtttgcctgcggctgccagcgtgattaactttgtggtgctgacctctgccgcttcttccgctaacagcggcgtcttctctaccagccgtatgctgtttggtctggcgcaggaaggtgtggcaccgaaagcgttcgctaaactctctaagcgcgcagtacccgcgaaagggctgaccttctcttgtatctgtctgctcggcggcgtggtgatgttgtatgtgaatcccagcgtgattggcgcgttcacgatgatcacgaccgtttccgcgattctgtttatgttcgtctggacgattatcctttgctcgtacctggtgtatcgcaaacagcgtccgcacctgcatgagaaatcaatctacaagatgccgctcggcaagctgatgtgctgggtatgtatggcgttctttgtgttcgtggtcgtgttgctgacactggaagatgacactcgccaggcgctgctggttaccccgctgtggtttatcgcgctggggttgggctggttgtttattggtaagaagcaggctgctgaactgcggaaataaccgcattatcatgctggatggcgcaatgccatccagcttttagatcactcacccgccagcgcgcgcgggaacagcacattgttttccagactgatgtgatccatcaagtcatcaatcagttcattaatgccgttatacatcgctttccaggtggtgcaggcttctggcggcggtgtgacgttattggtggtgtgtttaattacttccagcagttcgcccgcttcatcgtgctcgctttccattacgctgattggccccatcgcctggctgcccatgccttgtttgatcatcgggaagaggatctgctcttctttcatcatgtggctggaaagctcttcatgcagcatggtcaggtattttgtcagcccttttggcacgctcggtttgtcggcgtgaacgcgctcgactttagtcgcttgcaggatcagctccggcagctgctcgcggtggcgatcgtggtagcgcacgatgatatggtcgatgatttcagccagcggggcgctgcgccagtctttctcaatcggttgttcagcaagctttgccagttcagcttcaatgacctcaacatccagctctttacgtgccgccgcacgcgccagcgtttgcttaccgccgcagcagtaatccatatcatatttacgaaacagagccgaagcgcgaggaatagagagcgccagttcacctaaaggttggtcgcgataagccatagctgatacctcattcttaataatataagatgtattttaaatgcatctttaaggcaaatgctataacccttacgtagcagaggcttatttaactcactgccagcgtgtcaactttctgagacagattcagttaaaggcttttccggtttggctctgaccgcaatgaccacgccaatcactaacagcgcgataccgctcagcgtcattagcggcggcatttgctggcggagtaaaaaggtgtacagcaaacctgccagcgtttcgaaaacaatcaacggtccgaggataaccgtcggtaatcgctggctggcgacgttccagcagagtgcgccaacccatgagcaaagcacggctatcgcaatcatcagactaataaacaccagcggacgggggccaaaaggtagggagaagtccggcgtttgcgtattcagccagtaacaggcgacgagatagccgatgagagaaaccggcagcgtgaccagcgcctgcgccgtcgcccacatcatcggatgtttgtcgggattctcccgcagccagcgggcgttgcgcagggcataccatgcccagcagaccacggaaactaacgccaacacgatgccagaggtataacgtgcccagtcaaaatcggggagtccgtggtctaactcagcaatatttacacatgccaggccgatgccaatacaaaccagcgccggggcgagtttcccccacgcgagtttaccgtcacgctggctataaagcagattggcgaggacaggaatcaccaccggcagggtgccgataatcatcgtggaaacaggcgcgccagtacgttgaatggcactggcaaggcagaagtaatagatgaggttgcccatcatggtgagcatcaaggcggtaagccagtcgcgacgcgccaactgacgcagacgcacgcgtcccagccaggcaatgggcagcgcaattaaccctaacgccagataacgccccatagactgcaacatcgccgggtattccggcacgatcaacggcccgacaaaaataagcccccacatcaaccctgctaacagggcgtacagcacgccgctaatcattactggcatccatttgtctgtcagaagaaacgttcaggaagcagacatgattgctcccggcatcccgtcattatcagagaggatgcgggaggatgccactttaattaactagttattaacattaaaaagatggcttacgctttcggctaacgttgtcgttgggcggccaatcaatttgctcagcgttttgctgtcatcaaacagaccgcctttcgatgcgccaacgtcagaatcagccagcatatccgccagcccgccaggcagtccgacgcttttcagtgccgcagcgaaatcggtttcgctcagattttgataggtaaccgattttccgctctgtttggtcagctctgccgctaactgtgtcagcgtccaggcactatcgcccgccagctcgtaaaccttgccttcgtgaccggcttcgctaatcacgagcgccgcagctgccgcataatctgcccgcgttgccgaggcaattttgccatcgcccgcggcaccgataaatacgccgtgttccagtgctgccggggcgctggcgaggtagttttcgctgtaccagccgttgcgcagcagggtgtaaacgatgccagaatcagccagcattttctccgtctcgatgtgctcatcggcgaggccgagcggggaggtatcggcatgtagcaggctggtataagcgataaatttcacgccagccgcctttgcggcattaataatattacgatgttgcggggcacgttgacccacttcgctggaagagatcagtagcagtttttccactccctgaagagcagatgtcagtgcggtttcatcgccgtagtcagccagacgcacggtaatgccttgtgctgtcagtgcctgggcttttgccggattacgagcgatagccactatttggctggcaggaaccgttttcatcaaggattcaataacatagtgtccaagttggccagtggcaccagtaattgcgatcatgggaagcctccatcgttttgtcttgtgtttaaatacgctaccacctaaacttacttttagtaagtacgtacaaaaaggtaagtatgagatgagtcaggttagcctgtcgcaacaactgaaagagggtaatctctttgcggaacagtgcccgtcgcgcgaggtgttgaaacacgtcaccagccgttggggggtgttgattctggtggcgctacgcgaaggtactcatcgctttagcgacctgcggcgcaaaatcgggggggtgagtgaaaagatgcttgcgcagtcgttacaggcgctagagcaggatggttttcttaaccgtatcgcgtatccggtggtgccaccgcatgtggaatatagcctcacgccgctgggcgagcaggtgagcgaaaaggttgctgcactggcggactggattgagttgaatttgcccgaggtgttagcggtgcgggatgaacgtgcggcataactgccggatgcgctgcgcttatccggccaacggtgcatggcttgtagggcggataagatgcgccagcatcgcatccgacaaaagtgccggatgcggttgataatttataggtcgaaaaagaagtgtattacttactcaaatccacctgataaatcgcaaacccgatatcatcggtcgcgactttattcatcggatattgccctttctctttaataaacgctgcggctttatctgacggagaggtttcgaaacggatatccagtttcttatcgccagttatcggtgctaaacgccagttgttatctgccgccgggtgaatttcccccgcacgtttcgactcttcagcaatccacgctgccagcaccgagcggttctcatccggtgaagcaaaagcgatatggctgtcgcccgtaccggcaaatttgccgccgtaagcgcgatagttattggtggcaacgaggaacatagcgttcggatcaatcggcttgccgttaaaggtcaggttcttaatcctttccgcattggcattaatcatctggcactcgccgtcataacgggcgggctgggtaacatcaatctgataattcacaccatcaatcacatcaaagttataagtgcggaaaccatcccagttaatgagtgactgtggtttcgtgctgttaggatcaatctggttaaactgtccggcagagcattccagccactctttcacctctttaccgctggctttcaccacaatcagcgtattggggtagagataaagatcggcggcattacggaaagtcagctgacctttttccacctccacatagcttgccgggtcatttttgcgaccaccaactttaaacggtgcggcagctgaaagcaccggcagttttgccagatccggatcgccctgaatgtaatgctcgacatacgctttttgcgcgttgttcaccacctgcacggtcggatcgtcctgcaccagcgccagatagctatacatattgtcggcagatttaccgattggcttgctgacgaactggcgtgtggcatcgtgatcggctttgagtgtttctaccagcttgctgtcttccgccgcgagggattttttattagcgatgtcgtaaatcggtcgtgcttccgctttcgcctgcgtcacctgccatttaccgctgtcattactgagttgtaagtcgaccacaccaagatgatcgccccacatgcccggcattaccgccggaacaccattcagcgtgcctttggcgatatcagctccttcgatatcagcaaaatctttacctgggaaaacggcgtgggcatggccaaacataatggcgttaacgcccggaatttcactgaggtaataaactgagttttccgccatcactttatacggatctgcagacagaccagaatgcgccagaacgacaacgacatcggcacctttctcgcgcatttcaggcacgtatttgcgcacggtttcggtaatatcattcaccgtcactttcccggataaattagctttatcccagcccatgatttgcggcggcacgacgccaatatagccaatcttcagcgtctgtttttttccgtctttatcgaccacttcggtgtctttaattaaatacggtgtaaacattggctgtttggttctggcgtcaatgacgttggcatttacataagggaatttcgctcccgccagcgcatttttcaggtaatccagaccgtagttaaactcgtggttgccaagcgtgccgacggtatagtccagcgtatttaatgccttatagaccgggtgaatatcacctgcttttaaacctttcgccgacatgtaatcggccagcggactcccctgaatcaaatcgccgttatcgaccagtacgctgtttttcacttcattgcgggcatcgttaatcaggcttgcggtacgtaccagtccgaatttttccgtggcggtgtctttgtaataatcgaaatccatcatgttgctatgcagatcagtggtttccatgatacgcagatcgaccgtcgctgcattcacactggcggcaatcagcgtggccaggagcgttgcgctaaacttaatcatcagggacatccttttatcatcgggaatacgaaagaaaagggagaataaacgtcttacttatagaacagtgaagaatgccacaattttacgctttgaaaatgatgacactatcacagttggcgcattcattaacgatagggtataagtaaaacaataagttaacaccgctcacagagacgaggtggagaaatgttagatcaagtatgccagcttgcacggaatgcaggcgatgccattatgcaggtctacgacgggacgaaaccgatggacgtcgtcagcaaagcggacaattctccggtaacggcagcggatattgccgcacacaccgttatcatggacggtttacgtacgctgacaccggatattccggtcctttctgaagaagatcctcccggttgggaagtccgtcagcactggcagcgttactggctggtagacccgctggatggtactaaagagtttattaaacgtaatggcgaattcaccgttaacattgcgctcattgaccatggaaaaccgattttaggcgtggtgtatgcgccggtaatgaacgtaatgtacagcgcggcagaaggcaaagcgtggaaagaagagtgcggcgtgcgcaagcagattcaggtccgtgatgcgcgcccgccactggtcgttattagccgatcccatgcagatgcggagctgaaagagtatctgcaacagcttggcgaacatcagaccacgtccatcggctcttcgctgaaattctgcctggtggcggaagggcaggcgcagctgtacccgcgcttcggaccaacgaatatttgggataccgccgctggtcatgctgtggctgcagctgccggagcgcacgttcacgactggcagggtaaaccgctggattacactccgcgcgagtcgttcctgaatccggggttcagagtgtctatttactaaattcagatggcagaaacagtgtatttcctgattctgccatcctgatttctcccaacctaaaaagttataaataaaaagagattgtatttaaagtgcaaaaattcaattgctaataagttacattttaataatgagcgttttttgatagtttacttctataatgagatatttaatggcgacataaaataaccaaataaaataaggtagccatatgttacccaggatcagacacaataattttattggtgcggtggagttattcgtaaaatcatcgcatacaaaaacacattcaaacaatttttttaacaatatccagcatgcatttaagaaaaaagactggatttcgaattatgatagcctgttaactttgcgggagttctttcgttgcgcaacacagattaataaaaatagttatcaagtgctttcatcaaaaaatgaaactgttaacgccatggataagtttcttatcagtttcagccttaaagataacggtgccgaatatacaatgacattgcgaggcagtggatttgaatacgaagaaatccccataacaataaatgagtataactcattcatggatttcaaaaaccgtgaatttccgttagaacaaaacagacgattgtatgcctgggatattttgcagaaaaaacagtctgacataccggaaaggattaaaggttatattcgccaggcgtttggtgacgtgtctttaggttatgctgtattggatgatatagtaagtaaattaaaacggggtaaatttgacctccaaataccaggaggtggaattaaagaatgcgatggatggtatatttacgaaaaaataattgatgataattttgccatagtcatagaatctttgggctttgcgcttaaaatctatggaggggatgaacgttttcgtaatggttcctctgttgttttggaggatgaagattactctcttatttataattttctggttaatgcaggttgccaacaagtcgaattagccgaacaagtggatgcgatagtaagtgcgaatctggccgcagatagtgatattaccgaagaaaagatttgcgagaaatataaatcgaccattgaggcgtttaaaaaaaagcaactagcgttaccagtatgagttcggcgtaagaactcagaggcttaattcccctatcccatagataacgataggggaaaattatttttgcagaatttatgttattgccattatttgagcaacttttgcagcaggtccatcacttgctgcacctcttccggtgtgagcgccccgtctttggcccattgcacgcgaccgtctttatccagcaccactacagcggaactttcttcatccagctgccaggcaccgcgcgcgacgccattgctatcgacaataaactgcgaccagggataaagctttttattactctccagactgctgcgcacaaacatgccggaacccggaatcgcgtcgtcggtgttaacaatggtggtggtctggtaacgatcgtgcggtaactttgctgatttaatcgcttcaatcagcgtcgcgtttttctcttttgcagaggtgcgaccagcaatatgttgcagtactcgcacttttcccactaactgcgcgctgttccaggttttgtagctaaactgatctttatcaagcaccaactcgccccggtcggtaatgccaatcggcggcactcgctgaccggtttcgaactgatgtgcggaagccatcatcggcaacagcaggcaggtgagtgccagaatcttgtgtagggtcatggtgtttccttcttatgatatgcaggtgatccgaccacttgggtctgagttttaatcatatgtgctatttatcgaatttcccgcaagtgtgatgccagtttgcggtcaagcgcacaaatcatatgaaaaatgaatgcttatactgaagaccgcgcttcggtaaaaagataattctgaataattgtaacctttaggtaaaaaaagttatacgcggtggaaacattgcccggatagtctatagtcactaagcattaaaatttgcgcctcataatagttgggccgattgtggcaccgcacaggcgtaatactcagcaggagataacaatgaaaattttccaacggtacaacccacttcaggtggcgaagtacgtaaagatcctgttccgtggacggttatacatcaaggacgttggcgcttttgaatttgataagggtaagattcttatcccaaaagtgaaggataagctgcatttgtcagtgatgtccgaagttaaccgtcaggttatgcgtctgcaaacagagatggcttaaccaaagtgctatgcagtaataagacggctcctgattcaggagccgttgatgtttctgggggttacgcgacgctttcttctttatctttagcgtcaggcagttttggcgaaagggcggtggccttgctgtcgatccgggtcaccagcagctggtcgatgcggtagttatcgatatccaccacttcaaatttgtagccggcgaatttcaccgaatcggtgcgtttcgggatcttacgcagcataaacatcataaagccgccgatggtttcgtagttgcccgactgcgggaactcgtcaatatccagcacgcgcatgacgtcgtcaatcggagtgccgccgtcaatcagccatgagttctcatcacgggcgacaatctgctcttccagcccctgaccgaccagatctcccatcagcgtggtcatcacgtcgttgagggtgatgatccccactaccagcgcgtactcgttcatgatcaccgcgaagtcttcacctgcggttttaaaactttccaacgcctctgaaagggttaacgtatccggcacaatcagcgtgttgcggatttgtacgccgctgttcagtgccaggctttggttagccagcacgcggttcagcaggtctttagaatcgacatagccgatgatgtggtcaatatcttcattacagacgaggaacttagagtgcggatgttccgccaccttattcttcagactttgctcatcttcgtggagatcaaaccaaatcacgttttcacgcggtgtcattgaagacggaacggtacgggattccagctcaaagacgttttcaatcagctcgtgttcctgtttacgtaacacgcccgccagcgcaccggcttccactaccgcgtagatgtcatcagaagtgatgtcatctttacgtaccattggcagtttgaaaatacggaagatcatgttcgccaggccgttgaagaaccacaccagcggggtgcaaacgtacaggcagaagcgcatcgggttgatgatacgcaaagccaccgcttctggcgcaatcataccgatgcgtttcggggttaaatccgcaaacaggataaacatgccagtcactaacgagaaagagagaataaagctcagttgctcagagagttctgccgacatatagcgggagaacaggctgtgaaaagctggagaaaatgccgcatcaccgacgataccgccgagaatcgccactgcgttcagaccgatttggaccacggtaaagaacatgccgggattttcctgcatattcagaacgcgttgggcatttatattgccttcatcagccagcagtttaagtttgattttgcgtgaagcggcaagcgagatctcggacatcgagaagaacgcacttacagcgatcaagcagagtatgactaaaatactgtttaacatatcttatccgacctttcaggccagatcctcggaaggggaagttgattaatttgtgtgaaatacacattgaaagccgattcgaagaaagtgaaccggcattttcagtggctagtatagcgtaaggtactgtaaagccgccagagggttaaaattcagactgctgataaatgcaaaactgcctgatgcgctatgctgatcaggcctacgcagtgcctgcaatatattgaatttggagggttttgtaggcctggtaaggcgtttacgtcgcaaccggcataaacaaaacgcactttatcaacaatctacatttgtacccgtaacgctatgcttccggcggcagacagacgccaattccgccaattccacagtaaccatacgggtttttatgcagatattgctggtggtcatcttcggcataataaaacggtgtggcgttagcaatttccgtggtgatgtgacgatcgtcatcggcggcaagcatcgccgcctgaaaacgttccagactggcgcgagcagcagcatcctgttctggggtcagtggataaatcgctgaacgatactgcgtgccgtggtcattgccctgacgcattccctgggcgggatcgtgattctcccaaaatacctgtagcaactgctcatagctgatgacggaaggatcgtaaacaatgcgtaccgcttcggcatgacccgtatcaccggagcacacttcccgataagtcggatttggcgtatagcctccggtatagcctgcggcggtgctgtaaacgccgggtaactgccagaacagacgctccacaccccagaaacaacccatcgcaaaaatggcaatctccattccgtcaggtacattggtcattgagtgaccgttgaccgcatgcagcgtggctacgggcatcggggtgttacgtccaggcagggcatcggcgggggaaaccagatgctttttatcaaataaactcatggtgtcgctctcccgaaaatcggtcattggggttaaggttgtaacaagaggcgtatttgcacacaataaccaccgtgaataggtctaaagtaaaacataagaaatatttggggtttagtctgctttttaatccatattactggatttttgttaagccgtttaacggcgttccaggggcaggaaaaaaggatattcaggagaaaatgtgcgctatatccgacagttatgctgtgtaagcttactctgcttaagcggatctgccgtcgccgcgaacgtccgtctacaggtcgaggggttatcgggacagctggaaaagaacgttcgtgcgcagctttctacgattgaaagtgatgaagtgacgccagaccgtcgctttcgcgcacgcgtcgatgatgccatccgcgaaggtctgaaagcgctgggttattaccagccgaccattgaatttgatctccgtccaccgccaaagaaagggcggcaggtattgatcgccaaagtcacgccaggcgtgccggtgttaattggcggcaccgatgtggtattgcgcggcggcgcgcggaccgataaagactatttgaaattgctcgatactcgcccggctattggcacggtgctgaaccagggcgattatgaaaatttcaaaaagtccttaaccagcattgcgttgcgtaaaggttatttcgatagcgaatttaccaaagcgcagctgggcattgcgctcggcctgcataaagccttctgggatattgattataacagtggcgaacgttaccgctttgggcatgtgacctttgaaggatcacaaatccgcgatgaatacctgcaaaatctggtgccgtttaaagagggcgatgagtacgaatcgaaagatctggcggaactgaaccgccgactttctgctaccggctggtttaactcggtggtggtggctccacaatttgataaagcgcgcgaaacgaaagtattaccattgacgggcgtggtttcgccgcgaacagaaaacaccatcgaaaccggggtcggttactctacggacgtgggaccgcgcgtgaaagcgacgtggaaaaagccgtggatgaactcatacggtcacagtttgaccaccagtaccagtatttccgcgccggaacagaccctcgacttcagctataaaatgccgctgctgaagaatccactggaacaatattatttggtgcagggcggttttaagcgcactgacctgaacgataccgaatctgactccactacgctggtggcttctcgctactgggatctctccagcggctggcagcgtgccattaacctgcgctggagtctcgaccactttactcagggtgaaattaccaacaccacgatgctgttttatcctggggtgatgattagccgcacgcgttctcgtggtggcctgatgccaacctggggcgactcgcaacgctactctatcgactactccaacacggcctggggttcagatgtcgatttctccgttttccaggcgcagaacgtctggatccgcacactgtacgatcgccatcgtttcgttacacgcggcacgctgggctggattgaaaccggtgatttcgacaaagtaccgccggatctgcgtttcttcgccgggggcgatcgcagtattcgcggctacaaatacaaatctatcgccccgaaatacgccaacggtgacctgaaaggggcctcgaagttgataaccggatcgctggaataccagtacaacgtgaccggaaaatggtggggcgcggtgtttgtcgatagtggcgaagcggtaagcgatattcgccgcagcgactttaaaaccggtaccggggtcggcgtgcgctgggaatcgccggtcgggccaatcaaactcgattttgccgtaccggtcgcggataaagacgaacacgggttacagttttacatcggtctggggccagaattatgagtttatggaaaaaaatcagcctcggcgtggttatcgttatcttactgttgctgggatcggtggcgtttctggtgggcaccaccagcggcctgcatcttgtatttaaagcggcggatcgctgggtgccaggactggatattggcaaggtcaccggcggctggcgcgatctcaccttgtctgacgttcgttatgagcagccaggcgtggcggtaaaagcgggtaatctgcatctggcggtcggtcttgagtgcctgtggaacagtagcgtttgtattaatgacctggcgctgaaagacattcaggtcaacatcgacagtaaaaaaatgcctccttctgaacaggttgaagaagaggaagatagcggtccgctggatctctccacgccgtatcccatcaccctgacacgggtggcgctggacaacgtcaacatcaagattgatgacaccacggtgtcggtgatggacttcacctccggcctgaactggcaggagaaaaccctgaccctgaaaccgacgtcgctgaaaggcctgctgattgctctgccgaaagtggcggaagtggcgcaggaagaagtggtcgaaccgaaaattgaaaatccgcagccggatgaaaagccgctcggcgaaacgctgaaagatctcttttctcgcccggtattgccggaaatgaccgacttgcatttgccgcttaacctgaacattgaagagtttaaaggcgagcagttacgcgtgacgggcgacacggacatcaccgtgcgcaccatgctgctgaaagtgagcagcattgacggcaatactaaactggacgccctggatatcgattccaaccaggggatcgtcaacgccagcggcacggcgcagctgtcagacaactggccggtggatatcaccctcaacagcacactgaacgtggagccgttgaaaggtgaaaaagtgaagctaaaagtgggcggcgcgctgcgcgaacagctggagattggcgttaatctttccggtccggtggatatggatttacgcgcccagacgcgactggcggaagccggattgccgctcaacgtggaagtgaacagcaaacagctttactggccgttcactggtgagaagcagtatcaggcggatgatctgaaactgaaacttaccggcaaaatgaccgattacacgctctctatgcgtacggcagtgaagggacaggagatcccgccagccaccattacccttgatgccaaaggtaatgaacagcaggtcaatctcgacaaactcaccgtcgcggcgctggaagggaaaactgaactcaaggcgttgctcgactggcagcaggccattagttggcgcggtgagctaacgcttaatggcattaacaccgccaaagagttcccggagtggccgtcgaaactcaatggcttgattaaaacccgcggtagcctgtacggcggcacctggcagatggaggtgccagaactgaagctgaccggtaacgtcaaacagaacaaagtgaacgttgacggcacgctgaaaggcaacagttatatgcagtggatgatccctgggcttcatctggaactggggccaaacagtgccgaagtgaaaggcgagctgggggtaaaagatctcaatcttgatgccaccatcaacgcgccggggctggataacgcgctgccggggcttggcggtacagcgaaagggctggtgaaagtacgcggcacggtggaagcgccacaactactggcagatatcaccgcgcgcggcctgcgctggcaggaactttccgtgacgcaggttcgcgtggaaggcgacattaaatccaccgatcagatcgccgggaaactcgacgtacgcgttgagcaaatttcgcagccggatgtaaatatcaacctcgtcaccctgaatgccaaaggcagcgaaaagcagcacgagctacagttgcggattcagggcgagcctgtctccgggcagcttaatctggcaggaagttttgatcgcaaagaagaacgctggaagggaactcttagcaatacccgcttccagacgccggtcggcccgtggtcgctgacccgcgatattgcgctggattaccgcaataaggagcaaaaaatcagcatcgggccacactgctggcttaacccgaatgcggaactgtgcgtgccgcaaactatcgatgcgggggccgaagggcgtgcggtggtgaatctcaaccgcttcgacctcgccatgctgaaaccgtttatgccagaaaccactcaggccagcggtatcttcacgggtaaagcggatgttgcctgggacaccacgaaagaggggctgccgcagggcagtatcaccctttcggggcgtaacgtgcaggtaacgcaaaccgtcaacgatgcggcgctgccggtggcgtttcagacactgaatctgacggcggaattgcgtaacaaccgtgccgaattgggctggaccatccgcctgaccaataacggccagtttgatggacaggtgctggtgaccgatccgcaaggccgccgtaatcttggtggcaacgtcaatatccgtaacttcaaccttgcgatgataaaccccatctttacccgtggggaaaaagcagcggggatggtgagtgccaacttgcgtctgggtggtgatgtgcaaagcccgcagttgtttggtcagcttcaggttacgggtgtggatatcgacggcaactttatgccgtttgatatgcagccgagccagcttgcggtcaactttaacggtatgcgctcgacgcttgccggtacagtacggacccagcagggtgaaatctacctgaacggtgatgccgactggagccaaattgaaaactggcgggcacgagtaacggcgaaaggcagtaaagtgcggatcaccgtgccgccgatggtacgaatggatgtatcgccagatgttgtattcgaggctacaccaaacctgtttaccctcgatggtcgcgtggatgtcccgtgggcgcgcatcgtggtgcacgatctgccggaaagcgcagtaggcgtctccagcgatgtggtgatgcttaacgataacctgcaaccggaagagccgaaaacggcgtcgattccgattaacagtaacctgattgtccacgttggcaacaatgtgcgcattgacgcctttggcctgaaagcgcggctgacgggcgatcttaacgtcgtacaggacaaacaagggctgggcctgaacgggcagatcaacatccctgaagggcgcttccatgcctatggtcaggatctgattgtgcgtaagggtgagttactgttctctggtccgccggatcaaccgtatcttaatattgaagctattcgtaacccggatgctacagaagacgacgtaatcgccggagttcgcgtcactggtctggcggacgaaccgaaagcggagatcttctctgacccggcgatgtcgcaacaagctgcattgtcttatttgctacgtggacaagggctggagagcgatcagagcgacagtgcggcaatgacctcgatgctgattggtctgggggttgcgcaaagtggccagattgtgggtaaaatcggcgagacgtttggcgtaagcaatttagcgctcgacacccagggagtaggcgactcctcccaggtagtggtcagcggctatgtattgccaggtctgcaagtgaaatacggcgtgggtatatttgactctatagcaacactcacgttacgttatcgcctgatgcctaagctatatctggaagccgtgtctggtgtagaccaggcactggatttgctctatcagttcgagttttagcaatgcgaatatttgtctacggcagtttacgccacaaacaaggcaacagtcactggatgaccaatgcccagttactgggcgatttcagtatcgataactaccagttgtatagcctgggccactatccaggcgcagttccggggaacggaacggtacacggtgaagtttatcgtattgacaacgccacgctggccgaacttgatgccttgcgcaccaggggcggtgaatacgcgcgccagttgattcagacgccgtacgggagtgcatggatgtacgtttatcaacgacccgtcgatggattaaagctaattgaaagcggcgactggttagacagggataagtaataataaaagcacgccaccttcgggtggcgttgttttatgcgatgtatctcgcgattttttttgtaacttttccatcttttgcttttctctccgagccgctttccatatctgcaatcccataaaaaactctgctggcgttcacaaatgtgcaggggtaaaacgggggcacgctttgaacggtgagtatgagtgaggtcggctaacttccagcaagtggctatgaacagcaaaatggtggtcgggtttgcttgttcttaccgttcaagccttgcaaccgctgagaataatgatggtggaatagagagtttatttatcgcgggcataaaaaaacccttactaaccgaagcccggcgttcagggttattgcgctagaagaacttatttattctttgcgcgctcgaaggaagcaacgatttcagctttagcggcttctgcgttttcccaaccttcaactttcacccacttgcctttttcgaggtctttgtagtgctcgaagaagtgagcgatttgcgctttcagcagttcaggcagatcgtttacgtctttaatgtgatcgtattctttgctcagcttgctgtgcggaaccgcaaccagtttcgcatcttcaccggcttcgtcggtcattttcagaacgccaaccggacggcaacggatcacagaacccggctgcagcgggtacggagtcgggaccagtacgtcaaccgggtcaccgtccagagacagggtgtggttgatgtaaccgtagttgcacggatagaacatcgcggtggacatgaagcggtcaacgaacagtgcgccgctctctttgtcgatttcgtatttgatcggatctgcgttagccgggatctcaataacaacgtagatgtcttccggcagatctttacccgcagggacgttgagtaagctcatgtctgtttcctttaaaaatatgtggcaaacaagtgccgagtattatagccaactcgcgccgaatgtctttgcttgttttcgtcttcattttcctttttcgccagttttaagacggtatacagagcaggaaaatccataaccgtagccgcatttttcatagtgagatgaaagcgattacaaacttgtgattaacgttttatttacttttttgaagtgtgatgtaacgcaatccgttacataacgaattgtctatagttttttcgcgaacatcttttcaccaataataattaccccgacgaggacaaccctatgtggaaacgcttacttgtagtctctgcagtctcggcagccatgtcgtctatggcgttggccgctccattaaccgtaggattttcgcaggtcggatcggaatccggctggcgcgccgcagaaaccaatgtggcgaaaagtgaggccgaaaaacgcggaattacgttgaaaattgccgatggtcagcaaaagcaggaaaaccagattaaagcggtacgttccttcgttgcacaaggggtggatgcgatctttatcgctccagtggttgcgacgggttgggaaccggtattaaaagaggcgaaagatgccgaaatcccggtcttcttgctcgaccgttccatcgatgtgaaagacaaatctctctatatgaccaccgttactgccgacaacatcctcgaaggtaagttgatcggtgactggctggtaaaagaagtgaatggcaaaccatgcaacgtggtggagctgcagggcaccgttggggccagcgtcgccattgaccgtaagaaaggctttgccgaagccattaagaatgcgccaaatatcaaaattatccgctcgcagtcaggtgacttcacccgcagtaaaggcaaagaagtcatggagagctttatcaaagcggaaaacaacggcaaaaacatctgcatggtttacgcccataacgacgacatggtgattggtgcaattcaggcaattaaagaagcgggcctgaaaccgggcaaagatattctgacaggttctatcgatggcgtaccggatatctacaaagcgatgattgatggcgaagcgaacgccagtgttgaactgacgccgaatatggcaggtcccgccttcgacgcgctggagaaatacaaaaaagacggcaccatgcctgaaaagctaacgctgaccaaatccaccctttatctgcctgataccgcaaaagaagagttagagaagaagaaaaatatggggtattgagggtatcaatgcctgatgccgattcgtaggccggataaggcgctcgcgccgcatccggcgatggtgcactgaagcctgatgcgacgcttaccgcgtcttatcatgcctactgggagcacgctttacaccgggggaaaccatgacgaccgaccaacaccaggagatcctccgcaccgaaggattaagtaaatttttccccggcgtcaaagcgttagacaacgttgatttcagcctgcgccgtggcgaaatcatggcgctgcttggtgaaaacggggcgggaaaatcaacgctaatcaaagcattaactggtgtataccacgccgatcgcggcaccatctggctggaaggccaggctatctcaccgaaaaataccgcccatgcacaacaactcggcatcggcaccgtctatcaggaagtcaacctgctacccaatatgtcggtcgctgataatctattcataggtcgcgaacccaaacgtttcggccttctacgccgtaaagagatggaaaagcgcgccaccgaactgatggcatcttacggtttctccctcgacgtgcgggaaccgctcaaccgcttttcagtcgcgatgcagcaaatcgtcgccatttgccgggctatcgatctctccgccaaagtgctgatcctcgatgaacccaccgccagcctcgacactcaggaagtagagttactgtttggcctgatgcgtcagttgcgcgatcgcggcgtcagcctgatcttcgttactcactttctcgatcaggtctatcaggtcagcgatcggatcaccgtcttacgcaacggcagtttcgtaggctgtcgggaaacccgcgagctaccgcagatcgaactggtaaaaatgatgctggggcgcgagctggacacccacgcgctacagcgtgccggacgaacattgctgagcgacaaacccgttgcagcgttcaaaaattacggcaaaaaaggaacgatcgcaccgtttgatctcgaagtgcgccccggcgagatcgtcggcctggcaggcttgctgggatcaggacgtaccgaaaccgccgaagtgatcttcggtatcaaacccgcagacagcggcacggcgttgatcaaaggcaaacagcaaaccctgcgatcgccacatcaggcttcggtactgggtatcggcttctgcccggaagacaggaaaaccgatggcatcatcgccgccgcctcggtgcgggaaaatattatcctcgctctccaggctcagcgcggctggctacgaccgatttcccgcaaagaacagcaagagattgcccaacgctttatccgccagcttggcattcgcacaccttcaactgaacaaccaattgaatttctctccggcggcaatcagcaaaaagtgttgctttcacgttggctactgacccgaccgcaatttctgatcctcgatgagccaacccgcggcattgatgttggtgcgcatgccgagatcatccgcctgattgaaacgctgtgcgccgatggactggcgctgctggtgatctcttccgaactggaagagctggtgggctatgccgaccgggtgattatcatgcgcgatcgcaaacaggtggcggagatcccgctggcagagctttctgttccggcgatcatgaacgccattgcggcgtaaggagaacagtgtgatgcctcaatctctcccggacactacgccgccgaaaaggcgctttcgctggccaacgggaatgccgcagctggcggcgctattgctggtgttgctggtcgacagcctggtagctccgcatttctggcaggtagtgcttcaggatgggcgtttgttcggtagccctatcgacattcttaaccgtgcggcccccgttgcgctactggcgattggcatgacgctggttatcgctaccggtgggattgatctctccgtgggggcggtgatggctatcgccggagccacaacggctgcgatgacggtcgcgggattcagcctgccgattgttttgttaagcgccctgggcactggcatcctggcgggattgtggaacggcatactggtagcgatcctcaaaattcagccgtttgttgccaccctgatcctgatggtcgccgggcgcggcgtggcgcaactgatcacctctggacagatcgtcacgtttaactcgccggatctctcatggtttggcagcggatcgctggtgttcctgccaacaccagtcattatcgcggtgctgacgcttctcctgttctggctgttgacccgcaaaacggcactggggatgtttatcgaagccgttggtatcaacattcgggcggcaaaaaatgccggagtaaacacgcggatcatcgtcatgcttacctacatgttgagcgggctgtgtgcggcgatcgcgggcattatcgtggcggcggatattcgcggtgccgatgccaacaacgccggattatggctggagctggacgccattcttgcggtggtgattggcggcggatcgctgatgggcggacgttttaacctgctgctctcagtggtaggggcgctgattattcaggggatgaacaccggaattttgctttcgggctttccgccggagatgaaccaggtggtgaaagcggtggtggtgctttgcgtgctgattgttcagtcgcaacgctttatcagtctgattaaaggagtgcgtagccgtgataaaacgtaacctgccgctgatgatcaccatcggcgtctttgtgctgggttatctctactgtctgacgcagtttcccggttttgcttccacaagagtgatctgcaatatcctgaccgataacgcttttctggggatcatcgccgttggcatgacctttgtgatcctctccggtgggatcgatctctccgtcggttcggtgatcgcctttaccggcgtgtttctggcaaaagtgattggcgatttcggcctctcgccgctgctggcgtttccactggtgctggtgatgggctgtgcctttggcgcatttatggggcttttgatcgacgccctgaagatcccggcgtttatcattactttggcaggaatgttctttttgcgtggcgtcagctatctcgtttcggaagagtcgatcccgataaatcatcctgtttatgacacgctctcaagccttgcatggaaaatccctggcggcggtcgcttaagtgcgatggggctgctgatgctggcggtggtggttatcggcatattcctcgcgcatcgtacccgttttggtaatcaggtatacgccattggcggcaacgcaacgtcggcgaacctgatggggatttccactcgcagcaccactattcgcatttatatgctctccaccggacttgcaacgctggcggggattgtcttctcgatttatacccaggccggatatgcgctggcgggcgtaggtgtggaactggacgctatcgcctcagtggtgattggcggtacacttttgagcggtggcgttggaacagtacttgggacgctttttggcgtggcgattcagggactgattcagacatatatcaactttgacggtacgctgagttcctggtggacgaaaatcgccatcggcattttgttgtttatttttatagcattacagcgtggattaacggtgctgtgggaaaatcgtcagagttcgccagtaatgagagtgagtccggaaattagaccaaaagaataaattttactgatatataaggatatttttatgtgggtgaaggacggcgaagaattacaaacaacatgtaaaaactgtggtgtggctgttttaccacctgatgattattataaaagttgtgcggataaaaagcttacagggattggcggctggctatttctgccggcaattggtttagtgcttggtattcttgcgaacgcgtattcaattatccatacttgggggcttactcacgtaatttacgaagaaccgctcaggacggcactttatctggaaaccgccggatttgccgttttgtttctgctgttgattaatactacttatttgttttttaacaaaaaacgccagcttccacagtattatattgcccttcttctgtcactgtttgcattcattgtggctgatatttgggggacaatgcactttcttaatgcctcatttgaattgacagatgcatgggagcttctgaaaagtatcatccatcttgcaatctggatcccctatttttgcgtatctaaaagagtcaaattaacctttgttaattgataattgaaaacgccggactgctccggcgttaacttatttacgcgtccgggaattcacggataaagcgttcgacatcttcaaccatatggtcgttgccgacaaagaacgaacggcgctggtgcagggtttccgggatgatatccagaatacgctctttgccatcgctcgctttaccgcccgcttgttccgccaggaatgccatcggattgcactcatacagcaaacgcagtttgccgtccgggtggctggcggtgcttgggtagagataaatcccacctttcagcaggttacggtggaaatccgcaaccagtgagccgatataacgcgaggtatacgggcgattggtggacttatcttcttcctggcagaatttaatgtacttcttcaccccgttcggaaacttaatgtagtttccttcgttgatggagtaggttttgcctttctccgggaagcgcatccgttcctggcacaggcagaaaacgccgagcgaaggatcgtaagtaaaggcgtgaacaccgcatccggtggtgtaaaccagcatggtagaggagccgtataccacgtaacctgcggcaacctgtttgttaccaggctggaggaaatcttcttccgttactggcgtgccaacaggtgtaacgcggcggtagatggagaaaatggtaccgacagagacgttaacatcgatgttggacgagccatccagtgggtccatcagcaccacgtattttgcgtgttcacagccttcaaagacgacaatctcatcttcttcttcagaggcaatgcccgcaacgatatcgcgtgctttcagtgcggctttcagtttttcattagcgaacaagtcgagtttctgctgaacctcgccctgcacgttctcagcaccgctggcacccaggatatcaaccagtcctgctttgttgatatcgcgatggataatcttggcgcccagttttattgccgacagcaaagcagtgagctcaccggtagcatgagaaaactcgtgctgcttttcgacaataaattcacctaacgttttcataaaactttccctgcaatgtttatggagtaaagcgaccgcaacaatcttaacaaataatctcaatgttgcgctcaggtgaatcgcgccagcaaattacggattatcctgaaatgcgtttctcacttgcccgacatatgcgtaaaatgagcgccagattaaaaaaggatagtgacgtatgcgcattcatattttaggaatttgtggcacgtttatgggcggtctggcgatgctggcgcgccagttaggccatgaagtaacgggttcggacgccaatgtgtatccgccgatgagcaccttacttgagaagcaaggcattgaactgattcagggttacgatgccagccagctcgacccgcagccggatctggtgattattggcaacgccatgacccgtggaaatccgtgtgtggaagcggtactggaaaaaaacatcccttatatgtcaggtccgcagtggctgcacgattttgtgctgcgcgaccgctgggtgctggccgttgccggtacacacggcaaaaccaccacggcgggaatggcgacctggattctggaacagtgcggttacaaacccggatttgtgatcggcggtgtgccggggaactttgaggtttcggcgcgtctgggcgaaagcgacttctttgttatcgaagcggatgagtacgactgcgccttcttcgacaaacgctctaaatttgtccattactgcccgcgtacgctgatcctcaacaaccttgagttcgatcacgccgatatctttgacgacctgaaagcgatccagaaacagttccaccatctggtgcgtatcgttccggggcagggccgtattatctggccggaaaacgacatcaacctgaaacagaccatggcgatgggctgctggagcgagcaggagctggtgggcgagcagggtcactggcaggcgaaaaagctgaccaccgatgcttctgaatgggaagtcttgctggatggcgaaaaagtgggcgaagtgaaatggtcgctggtgggcgaacataatatgcacaatggcctgatggcgattgcggcggctcgccatgttggtgtagcgccggcagatgccgctaacgcgctgggttcgtttattaacgctcgccgccgtcttgagttgcgtggtgaagcgaatggcgtcacggtatatgacgattttgcccatcacccgacggcgattctggcaacgctggcggcgctgcgtggcaaagttggcggtacggcgcgcattattgctgtgctggaaccgcgctcgaataccatgaaaatggggatctgcaaagacgatctggcaccttcattaggtcgtgccgatgaagtcttcctgctgcaaccggcacatattccgtggcaggtggcagaagtggcagaagcctgcgttcagcctgcacactggagtggcgatgtggatacgctggcagatatggtggtgaaaaccgctcagcctggcgaccatattctggtgatgagcaacggcggttttggtgggatccatcagaaactgctggatggtctggcgaagaaggcggaagctgcgcagtaattctgaagccttgcatgtgtgtgtatgccggataaggcgtttacgccgcatccggcatttgagcatagtgcctgatgcgacgcttgatgcgtcttatcaggcctacaggtgcaccgtatccggcaaaccatactcacatcaacaacgaaaattacccttcgttttccgctaactcgcgcagatactggaaaatctgacgtgcggatttcggcggcttattcccttctttctctttcttcgcgttgcggatcagagtacgcagttgctgacgatcggcatcgggccacagattcaatacttcagcgatggcgtcatcaccctggtcgatcagacgatcgcgcaggttttccagtttatggaatagcaccacctgctgattgtgacggtttttcagcttatccagcgcctgacgaataggctctacgtcgcgctggcgcagcatcttaccgatgagctgcaactggcggcggcgaccttccatcttaatacgctgggcgagctcaatagccgcgcgcagatccgcatctaacgggatcttatccagcgcgtttttccccagatcaacaatttccgcgccaaggcgttttagctcctcggcatcgcgtttaatttcacttttactgacccagataatttcatcgtcttcgtcttcgatgtcatcaccgggaacgtcgtcgagccagtcttcgggctgcttagtcatctcaggctccttaaaaaaagaggctaatgttaccagttaagatgcgcactgaaaaacggttctctgttagacttcagagaaactctctacattatggcacttgcaatgaaagtaatctctcaagttgaagcgcagcgcaagattctggaagaagcagtttccactgcgctggagttggcctcaggcaaatcggacggtgcggaagttgccgtcagcaagaccaccggcattagcgtaagcacgcgttatggtgaagtggagaatgttgaattcaatagcgatggcgcgctggggatcactgtttatcaccagaaccgcaaaggtagcgcatcgtctaccgatttaagcccgcaggccattgcccgcaccgtacaggcggcgctggatattgcccgttatacctcgccagatccctgtgccggcgtggcagacaaagagctgctggcctttgacgcaccggatctcgacttgttccaccctgcggaagtttccccggatgaagccattgaactggcggcccgcgcagaacaggcagcattgcaggcggacaaacgcatcaccaataccgaaggtggcagctttaacagccactacggtgtcaaagtttttggcaacagccacggcatgttgcagggttattgctctacgcgtcattcgctctccagctgtgtaattgctgaagaaaatggcgatatggagcgtgattacgcctacaccattggtcgtgcgatgagcgatctgcaaacgccagagtgggttggggccgactgtgctcgccgcactttatcgcgtctgtcaccgcgtaaactctccaccatgaaagcgccggtcatttttgccaatgaagtggcaaccgggctttttggccatctggttggagcgatagcgggtggatcggtttaccgtaaatctaccttcctgctggattcgctgggtaaacaaattctgccggactggctgaccattgaagagcatccgcatctgctgaaagggctggcgtcgacgccattcgacagcgaaggtgtgcgcaccgagcgtcgcgatattattaaagatggcatcctgactcagtggctgctgaccagctactcggcgcggaaactgggtctgaaaagcaccggacatgcgggcggtattcacaactggcggattgccggacaagggctaagcttcgaacaaatgctcaaagagatgggcaccgggctggtggtgacggagctgatgggccagggcgtgagtgccattaccggtgattattcccgtggtgcagcgggcttctgggtagagaatggcgaaattcagtatccggttagtgaaatcaccatcgcaggtaatttaaaagatatgtggcgcaatattgtcaccgtcggtaacgatattgaaacacgcagtaatatacagtgtggttctgtgctgttgccggagatgaaaatcgccgggcagtaaaaaaactggcgcgacctgccgcgctataaactaaaaaattacacaaaatcattcgcactgcatcgagacggaaagcgaataagagccggggagcgtactcgtagtaggtgacccggtcgaatgagcgtagccgtcgatgaggcagtgtgaaggatgaagtgtaaataaaaaaggaagtgagcaatgcgtaaaagcctgttagctattcttgcagtctcctcgttggtattcagttcggcgtcgtttgccgctgatcttgaagacaatatggaaaccctcaacgacaatttaaaagtggtcgaaaaagccgataacgcggcgcaagtcaaagacgcgttaacgaagatgcgcgccgcagcgctggatgcgcaaaaagcgacgccgccgaagctcgaaggcaaatcaccggacagcccggaaatgaaagatttccgccacggtttcgatattctggtcagtcagattgacgacgcgctgaagctggcaaatgaaggtaaagtaaaagaagcgcaggctgccgcagagcaactgaaaacgacccgcaacgcctatcaccagaagtatcgttaattccttattgggcggtgaaacgttaccgcccaacgctttcttctccctttgtaaaatcaccgcaatatctatcttcaccacggcataaccctgcgtgtcgccctcatttttgcgaggcgttttccagaaatgaatgtaatgcatatgtaatgctataatgcattacacttttcataattaccggaggcataatggccacacttaacgtccgcctggatgacaaactgaaaaatgaggcttatgcggtgctggaaaaattaaatatcacgcctactgaagcagtgcggctgctgtttcagtacgttgcggaaaatggacgaatgccggtaaaaacgctcactgtcagtgatagtgaagaagccttgttacgcactgtcagggaacgactggccaacccacaagaggccattaaggtccgactggatgagtgactaacgcaaatgatgcaccacctgattgctgctgccgcgccagatcagggaagggtcttttaaatcctgcacaaatttgccgtcgaccagtacgttaatcaaatcaacaacctgcatttgcgcagcgttgagttcgtcgagtttatagcctgtccacacccagatgtctttacccggacattcggcgcggatgcgttgtaccagtttcagaatatccggcacgttttgcggatgcagcggatcgccgccggagagggaaatcccctggcgtttgatgcgagtgtcatttagatcgttaatgatctggtcttccattgctttggtaaatggctgaccggaatttacccgccaggtgcttttgttatagcaaccggggcattcatgaacacacccggagacaaacagggtacagcgagtgccggggccgttgacgatgtcgacaggatagtactgatgataattcattatttcgcctggcttatcagtccgcgtgtaggctgcatccggtaatcaacgcctgatgcgacgctgtcgcgtcttatcaggcctacagccgttgccaaatgtaggccggataaggcgtttacgccgcatccggcatttgcttagcgcagagtgaagattaacctatctgcccatttcccaaatgtttaacgcggcgcttaacttcttcctgcttaccagcgttaaacggacgtgcatccgggctacctaaatatccgcacacgcggcgagtcaccgacacacgggaggcgtcatggttaccacatttcgggcaagtgaagcctttgctggtgcactcgaactcgccagtaaagccacactcgtagcactcatcgatcggcgtattggtgccgtaatacggtacatgctgatagctgtaatcccagacatcttccagcgccttcaggttgtgctgaatgtttggatactcgccgtagcaaatgaaaccaccgttcgccagcggcgggtaaggcgcttcaaagtcgatcttgtcatacgggttcacctttttctccacatcaaggtggaaactgttggtgtagtaacctttatcggtcacgcccggcaccacgccaaactcagcggtatcgagacggcagaagcggtcgcacaggttttcactcggcgtgctgtagagactgaaaccgtaacccgtttcttctttccactgatccaccgcctgacgcagacgttcaacaatcgcgatacctttcgcgcgaagctgctcgttgtcgtaaacatgctcgccgccgaacagcgcgttaatggtttcgtggataccgatgtagcccagcgaaatagacgcacgaccgtttttgaagatttcagaaacatcatcgtcagcattcagacgcacgccacaagcaccttccatatagaggataggagctacgcgtgccttcacgccttccaaacgggcgatacgggtcatcaacgccttgcgtgccagcaccagacgttcatccagcagcttccagaaagtggcttcatcgccttttgcttccagagcaatacgcggcaggttcaggctgatcacgccgaggttgttacgaccatcgtggatctgctcgccgttttcattttcccacacgccgaggaagctgcggcagcccatcggggttttaaacgaaccggtgactttcactacctgatcgtagttcaggatatccggatacatgcgcttgcttgcgcactccagcgccagctgtttgatgtcgtagttcggatcgccttttttatggttcaggccatcgcgaatcgcaaacaccagtttcgggaacaccgcagttttacggtttttaccgaggcctgcgatacgattacgcaggatagattcctgaatcaggcgcgactcccagctggtgcccagaccaaaaccaaaggtcacaaacggtgtttgaccgttggcggtgtgcagggtgtttacttcgtactccagcgactggaaggcatcgtagcactctttgatggtacgagagttagcgtagccttcggcgtccgggatgttccactcttctgcggtcttgcgatgtttgttgtagctggcggtgacaaacggtgccagcacttcatcgatacggttaatggtggtgccgccataaatatggctggcgacctgagcaataatctgcgcagttacagcggttgccgtagagatcgacttcggcggttcaatctcggcgttccccattttaaagccctgggtcagcatgcctttcaggtcgatcaacatgcagttgaacatcgggaagaacggcgagtaatcgagatcgtgatagtgaatatcgccacgctcatgtgcctgcaccacgtcacgcggcagcaggtgctggcgtgcatagtgtttagccacgatcccggccagcaggtcgcgctgggttggaatcaccttgctgtctttgttggcgttttcgttgagcaacgaggagttggtctgctcgaccagaccacggatctcctggttcaggcgaccgcgtttttcacgttcaatgtcgcgatcgtgacggtactcgatgtaagcacgagccagttgtttgtatggacccgacatcagctggttttcaactgcggtctggatctcgttgatatccacctggttgcggccctgcatctgctcgctgacaaccgcggcaacagtggcgcaataatcggcatcatcgacttccgctgctttagctgcacgcagaatcgcttctttgatgcgctctgatttaaacggcactttgcagccgtctcgtttcatcacatgcggtgtcatgatcgctccatatttttaagaacaggttatccacagaaattgggaaaggtgttttccggttttttcgtttcgttttccggtgctttccgcaatcgccatccgcttatccacaacgccgcacctttttcgtggggagctgtagtagcaattatagtcgattaatacaacatattgggttgggacgcattttaaagtctatatatagtgctttgcatcaaggatgtttgaactttttttgatgtagctcaaagtaaaaagcagagcgtacggatgacgggcgctacagcgatatgtaaattttttaatgaatttgctggttgaaaaatcaacaaaaacaacatgctgacagacaaaaccccggaatgaccggcattaccggggcttagcggatacttacttctttaaccaccagacagcctcaaaaggccgtaaagtcatggcgcagggttgtggtgaggcttcttcgtagttatgcatcacaagctgccagttgccgcgcatttgccctggctgccagggttggatctcacggctaaggttggcaatgaccaacaaggtttgccccttccattcacggcgatagcaccacaatacagggctgtttggcagcagatcctggtaatcgccccatgtcagaacggcttcttgcttacgcagtgcgattaacttttggtaggtgtaaaacaccgaggactcatcggccagcgcggcttctacgttgatttgttgatagttatcgcccaggccaatccacggttcaccagccgtaaacccggcattatcgccgttgctccattgcatgggcgtgcggctgttgtcacgggatttactggcgaggattgccaataactcgtcggcatcacgcccatcgttgcgcagctcggcaaacatattgaggctctccacgtcgcgatagtcagtaatgcgcgtgaaatgtgggttagtcatgccaatctcttcgccctggtagatatatggcgttccctgcatgccatgcagcaccatcgccagcatttttgccgcaggcacgcggtattcaccttcatcaccaaagcgagaaacaatgcgcggctgatcgtgattacaccagaacaaggcattccatgccacgttgtgcattccttgttgccagtggcggaacaatgttttcaacgccacaaagtcaggtttagccagcgtccatttttcaccaccgggataatcgactttcaggtgatgaaaattaaaggtcatcgacaattcactgcctgtcagtgccgcgtatcgctggcaatgctcaaggctggtggaggacatttcacctacggtcattaacccgcgtggcgtaaacacatcgcggttcatctcgtgcaaaaactcgtgtgctcgtggcccgtcggtgtagaagcgacgcccgtcgccatccaggtcatcagggaaacgcgggtctttggagatcagattcaccacatccaggcgcaacccgtcgaccccacgatcggcccagaactcacagacttttttcagctctgcgcgtaccgctggattctcccagttgagatccgcctgttctggtgcaaacagatgcaaatagtactgttcgctttccgcatgccagcgccacgcgctaccaccaaattttgaacgccagttgttcggtggtgtttctggttctccatcgcgccagatataaaactggcggtaagggcttgctttgttcagcgcctcacgaaaccaggcatgttgggtagaggtatggttaaacaccatatcgagaatgatacgaatcccgcgcgattttgcctgtgtcaccagttcgtcaaaatcgtccagcgtgccgtaggtgggatcaatcgccgtatagttcgctacgtcgtaaccgttatcgacctggggagagacataaaagggggttagccagatggcatcaacgcccagtttatgcagatagtccaggcgctggataacgccacgtaaatcgccggtgccgctacccgtggtgtcctgaaaactctttggataaatctggtagataacgccgttttgccaccagtggggaagattagtcattacgttattcctgcaaatgcgagggggcgcaattgcgccccgaagaaaattaaacaatgtccagcgtgcccaggcggtatttccgctgatagataaacgaggtgagtacaatcgggatgacgatggcgatagccattgccagcgcaaacacctgccagtagctcggttgaatcgagagaattcccggcaggccgcctacgccgatgccattcgccataacgccgttcaggccgcatagcaatcctgccagaccagaaccaatcatcgcgcacagcatcgggaagcgatatttcaggttgatgccgtacatagcaggctcagtgactccaagccaggcggagatagcggcaggcacggagatctcgcgttcattatgcttgcggctggaaatgataatacctatcacggcggagccctgagcgatattcgacagtgcaatcagcggccacactggcgtgccacccatgctttgaatcatctgcaaatcaatagcaagcgtggtctggtgtacgccggtgatcaccagtggggcgtacaggaagccaaacaatgctgcgccaatcggagcaaagctgccggtcatcaggtgacgtaccgcaaaggcaacgccatcgccaatcatgcgaccaaacggaccaatcagcgcatgggcgaggaacaccgcgaggatcagcgaacagacgggcaccaccaccagatagaggtaatccggcacgatgcgtttaaggcgagtttcaataacgcccagcgccagcccggctaacagtgccgggatcacctgcgcctgatagcccactttggcgatgctgaacatgccaaagtcccacacttccggcagctgctgcccgagcagataagcattcatcagctgtggagaaaccagcgttacgccaagcacgataccaaggatcggcgtgccgcccatttttttcaccgctgaccagcaaatcccgaccggcaggtagaagaagatcgcttcaccgatcaaccacagaaaatcgtagatcgtttgcagggaagggtacatttgcgccagcgtctgaccgttgctcatgggcaaatcgccgatcacattgcgaaaaccgaggatcaaaccgccgctaatcagcgcgggcagcaacgggaagaagatctccgcgaaatgagagatcaactgctcatgccatttcatattctgccgggcggctttttttacctgctctttatcaacctgcgcctgtccggttgacgcaatcagtgcttgatagtaatcacccacgttggtgccaatcaccacctgaaattgcccggcattggtgaaacagcctttcaccatggggagttgctcaatttctttcggtctggcattggccggttggttgaggacaaagcgcaggcgagtaatacagtggctcaccgtcgcaatattgccgcgcccgccgaccagttcaattaactgatcgatatccgcttgattaactttgctcatcataaagccccatggcagatgacatttttggttggctgcagaatatattgcgcggaaaaatttaaaaacgggaacgttcccgaaacgcagcgaagatcacaatttatcgttcaggaaacgatcaggacagggtggcggggatgatgatttgttgcggttcgctgcgcccggttacctgcgcgatcaactggcaggccgcctggcgtccagcttcggcgtaaccgggatctacggtgacgatctccggatggaggaatttcattaacggcgtattaccgacgctcgccagttgcaaggtgtcgatgcgttgctcttgcaggtatttacttgcgccaagtgccagcgtgtcggttgcgcacagtaacgcggtagtttcaggcgtaatcacttttgctacgttctcatagccttgcttcatagcaagccctggcagagcggcaacgggatgcaatttatgcgttttgcagaacgccaggtaggcttcgtgacgtcgcttaccggtcgtcacgtcactatgcggcacgccgagataactgatattacgatgcccctggtcatacagccgttgcatcaggatcttgattgccccttcgtcgtcataacagaccgaagcaaagccttttgcgtcacgcgccagcagaaccagtgatgactgccagtgggctaacatttcttctgttatgccggtaaaaccgaacagcactacgccgtcgatattacgccgtttcagcacccccaaatgttcggcaactaattgtggggaaaactgactttccatcatgattggatcgtaaccttgttcatagaacgctggcagcatggtttgaacggcgagattttctgacaacgaatccagacgggtaacaatgatggcgaccactttatcgctttgcccacgcatagcgcgcgcagagcgggaaggggaaaatccatgctgattcatcactgcttccacgcgctcgcgcgtgcgctggctcacgccgctttcgttattcagcacccgggaaaccgtagatttccccacgccgcttaagcgcgcgatgtctttgatggtcagccgattttgcatcctgttgtcccgtaacgtgttgtttaattatttgagcctaactttacccgtgcattcagcaatgggtaaagtctggtttatcgttggtttagttgccagcaggtattatatcgccatagatgctacgaatattattggattctccttattatttgcggcgcttttttcacttaccggaggttatatggaacctgatcccacgcctctccctcgacggagattaaaacttttccggtaagcccgtcttttcacggcgttaccggatgcgtaaggccgtgacgttttaacgtcccagctcagctttattaccttcaggtaaggcttcgccacgcctgaagacatttctgtactgtttcagacagtgcggagggactccttatgtttaaagaaatttttacccggttcattcgccatttaccttcccgtctggttcatcgcgatccattgcctggcgcgcagcagacagtgaatacggcggtcccgccatccttaagtgcgcattgcctgaaaatggcggtaatgcctgaagaagaattatggaaaacgttcgacacccatccggaaggattaaatcaggcggaagtggaatctgcccgcgaacaacatggtgaaaataaattacccgcacaacaaccgtcgccgtggtgggtacatttatgggtctgctatcgcaacccctttaatattttactcaccattctcggcgctatttcttacgccacggaagatttatttgccgcgggtgttatcgcgctaatggtcgctatttctacgttgctgaactttattcaggaagcacgttccactaaagcggcagatgccctgaaagcgatggtcagcaataccgcgacggtgctgcgcgtaattaacgacaaaggcgaaaatggctggctggagatcccgatcgaccagctggtgcccggcgatattataaaactggcggcgggggatatgatcccggcagatttacgtatcttgcaggcgcgggatctgttcgtcgctcaggcgtcgttaaccggtgagtctctgcccgtggaaaaagccgctactacccgccagccggagcacagcaatccgctggagtgcgacaccctgtgttttatgggcaccaccgtggtgagcggcacggcacaagcaatggtgattgctacaggagccaacacctggtttggtcaactggcggggcgtgttagtgagcaggaaagcgagccgaatgcctttcagcaagggatcagccgcgtcagtatgctgctgattcgctttatgctggtgatggctccggtggtgttgcttatcaacggttacaccaaaggtgactggtgggaagctgcactgtttgcgctttcggtcgcggtaggcttaacgccggaaatgttgccgatgattgttacctcgacgctggcgcgcggcgcagtaaagctgtcgaaacagaaagtgatcgtcaagcatctggatgccattcagaactttggcgcaatggatattctgtgcactgataaaaccggcaccctgacgcaggacaaaattgtgctggagaatcataccgatatctccggtaaaaccagcgaacgcgtgctgcatagcgcgtggttgaacagtcattaccagaccggacttaaaaacctgcttgataccgcggtgctcgaaggtacggatgaagagtcagcgcgctcgctggccagccgttggcaaaaaattgatgagattccgtttgatttcgagcgtcgccggatgtcggtggtagtggcagaaaatgccgaacaccatcagctggtttgcaaaggcgcattgcaggaaatcctcaatgtgtgttcgcaagtgcgtcacaatggcgagattgtaccgctcgatgacaccatgctgcgtaagattaagcgggttaccgatacgctgaatcgtcaggggctgcgcgtggttgcggtggcgacgaaatacctgccagcgcgtgaaggagattaccagcgggcggatgaatccgacctgatcctcgaaggatatattgctttccttgatccgccaaaagagacaactgctccggcactgaaggcattaaaagcgagtggcattaccgtaaaaatccttactggcgacagtgagttagttgcagcgaaagtgtgccatgaagtggggctggacgcgggagaggtggtcattggtagtgatattgaaacgctatctgacgacgaactggcaaatctcgcacagcgcaccacgctgtttgctcgcctgacgccgatgcataaagaacgcattgtgaccttactgaagcgcgaagggcatgtggttggctttatgggcgatggtattaatgatgcgcccgccttacgtgctgcggatatcggcatttctgtggacggcgcggtagatattgcccgtgaagcggctgatatcatcctgctggaaaaaagcctgatggtgctggaagagggggttattgagggacgtcgcactttcgccaacatgctgaaatacatcaaaatgacggcgagttctaacttcggtaatgtgttcagcgtgctggtggcgagtgctttcttgcccttcctgccgatgttgccgttacacttgcttattcagaacctgctgtacgatgtgtcacaggtggcgatcccgtttgataacgtcgacgacgagcaaattcaaaagccgcagcgttggaatccggcggatctggggcgctttatgatcttcttcggaccgatcagctcgatcttcgatattctgacgttttgcctgatgtggtgggtattccatgccaacacgccggaaacgcaaacgctgttccagtcgggctggtttgtggtgggcttactgtcgcaaacgctgattgtgcatatgatccgcacccgtcgtgtaccgtttattcagagctgtgcatcgtggccgttaatgatcatgactgtgatcgtgatgattgtcgggatcgcattgccgttttcaccgctggccagttatctgcaattacaggcgctgccgttaagctatttcccgtggctggttgcgattctggcagggtatatgacgttaacccagttggtgaaagggttctatagccgtcgttacggctggcagtaaagaataaactgggcatggtggcccggattcagattgcagacaaagtgagctttgttcatgccggatgcggcgtaaacgcctaatccggcctacaaattcaataaattgcaggaatcacgtaggcctgataagcgtagcgcatcaggcgattttgcgtttgtcatcagacttaatccgggcatgatagcccggatttccatcaagattagcgacgaacagcgatcgcttcgatctcaatcttcacgtctttcggcagacgggcaacttcaacgcaagaacgtgccgggaaggtggcgttgtgttcggtgaagaaggcttcgtaagtggcgtttacggttgcgaagtcgttcagatctttcacaaacacggtggttttaacgatgtcgcccactttcaggcctgcggcttcgacgatcgcttttacgttatccagcgactgacgagcctgtgcagcgacgtctgccggtacttcgcccgttttcggatttaccgggatctgaccggaggtgatgatcatattgcccagatcaacgccctgtacgtaaggaccgatagctgccggtgcattttccgtcgcgatagttttgctcatgatttctcctttattacagcggtaaaaagtctggctcattatagggagccagacttttattaccaaccgcaattaattggccagcaccacattatgggaaaactctttttcacagtatttgcatttgagcgcgatgtcattggcgcgttttcgcacggcaaagctggaagaaaccggttcggcatggctgatacagttgctgttcgggcagaccagcacattgtcaatgcgctccggcagactggggcgcgatttaccaaccacttcatagttgtcgatacgatttaccgtggcttgcggcgcatacaatgccagttgatctacctgatcttcactcaaaaaggtattttcgattttgatcagatctttgcggcccatctcgccagaaggcagattcaagccgatggtaatacgctgatccgtttcagtcagcttgaacagactcaacagcttaaaaccgatctgggcggggatatggtcaattaccgtgccgcgtttaatagcttcaacctgcaatttattatcgtgtgtcatctctatttccccttacagtaccagatcgcgattcagaaccagtgccagtaacgcctggcgagcgaaaatcccgttgcctgcctgctggaagtaccaggcgtgcggcgttttatcaacatcggtggcaatctcatcaacgcgaggcagcggatgcagcactttcatattggctttggcgttgtggagatcgctggcgcgaagaacaaactgcgctttcacgttggcgtactcggacgggtccagacgctctttttgcactcgggtcatgtacaggatgtctacttccgccatcacttcttcaatagagctgtgcagactccaggcgatccctttttcatcgagcatatcaaggatgtattgcggcattgccagcgcgtccggcgcgatgaagtaaaaacggttgccgtcgaacttcgctaacgcctgagtcagggagtgaacggtgcggccatatttcaggtcaccaaccattgcgacgtggaggttgtccagacgcccctgggtttcctgaatggtgaataagtccagcaaggtttgcgtcggatgttggttggagccatcaccggcattcagtaccggtacattgccggaaaattcggtggccaggcgcgccgcaccttcctgcggatgacgcatcactatcgcatcgacgtaagtgctgataaccgaaatggtatcggccagcgtttcgccttttttacccagtgatgtattggcgctgtcggagaagcccaccacgctggcacccaggcggtgcatggaagtttcgaaagagaggcgggtacgggtagaggcttcgaagaaacagctggcaatgactttgtgcttcaacagctctggttgcgggtttgctttcagtttcgccgctgtcgccagcaccagattaaggtcatcgcgactaaggtcgtttatggaaatgatatgtttctgatatagcggattagccatcttttatctcctgacgcctgggcaaaaaaaagcccctcgattgaggggctgggaatgggtgatcaacgggaagaaaaacggcaggccagcgtcttttttcagacgcggtaagacaaaatgtcgaacacactgaaccatacatcctcccggcaaattgtccggcattatactcatcgtcagaagcggtgcaagcatttgatgcaatcttttgtcagcgcaaacggtttatttgaatttaaagtcaaaatatatgcatttttatttactgtgattctggagggggaactgtcgttcggtatcaataattgcagacatttcctgcttttttctttttcactttcacgcaatcagatatgcattttattccattcatccgacttatagggcggagtgtgaaaacgaacggctagcactattgcttacagctcagggatgcgcgctatcactttaatttcaaaatcaaagcctgccagccaggtaacacccaccgccgtccagtttggataaggaggggcgctaaatatttcatttttgaccgtcatgatgtcttcaaattgtttttccgaatcggtatgaaagctcgtaacatcaatgatatcgtcaaaagtgcatcccgcagctgccagggtcgcatgcaaattatcaaaggccagtctgacttgttgctgaaaatcgggttctggtgttccgtcctctcgacttcctacttgcccggaaacaaacagcaaatcgccggaacgaatagccgcagaataacgatgctcagcatacagtgaatgtcggccagcagggaaaacagcggttctttctaccatttggttatcctcaagatttacgacatgaacagaagatttatatttaccgggagccgcttttagggggacgacgttagtaaacaaaacccagacatcatggataatggctgggcttaattgagcgtagtcggttatgcgccaaacgcgccatcaatggtatgcatcgcgccggtaacaaaactgacttctggccctgctaaccatgcgaccataccagcgacctcttccggttgcccatgtcttttaatagccataaaaccatgcaacatatcgcgcattggcccgttggcgggattagcgtcggtatctattggccctggctggacgacgttgatggtgatcccacgcggtccaaaatcacgggccagcccgcgcgccatgccttgcagggcagatttactggcggcataagcagccatgcctgcaacaggcatacgatcgccattcacggagccgatgattaagatgcgcccgccttcgggcatctgccgggcggcttcaacagaggcatggtaaggggcatgaatattgattttgaaaaggcgatcaatatcgtcggcatttaattccagggcatcgccaaagacgccaatacctgcatttaccaccaggatatccaatgcgccgctcttacgaacgacatcaataacagcgtctctgtcagcactatctgtgaatactgctgtcgctccggtctcttgtgccaggtgttcagcggcatctttcgaccccgcataggtgaatcgtacattggccccatcggtgacgaaacgacgtactatagcggcaccgattccacggctgccaccgaggatgagaactgtcttaccggtaaaagcgcccataaggactccttgatttattatgtaacatgcattacaaaactgttttaactttctgtcaacaagttttgtaatggtcactaaaaaacaatctcgcgttccaggtcgtcccagacgtttcgctcctgagcaggcagtctctgcggcaaaagtgctttttcaccaaaaaggtttcgatgctgtcagtgttgctgaagttactgattatcttggtattaatcccccgagcctctacgcggcttttggcagtaaggctgggttatttagccgtgttctcaatgaatatgtcggtacggaagctattccgcttgccgatattcttcgtgatgatcgtccggtaggcgagtgcctggttgaggtattaaaagaagcggcgcgcagatatagccaaaacggcggctgcgctggctgtatggttcttgaaggtattcatagtcatgatccacaagcgcgtgatattgccgttcaatattatcacgccgcagaaacgaccatttatgactacatcgccaggcggcatccacaacgcgcacaatgtgtgactgattttatgagtaccgtgatgtctgggctttctgcgaaggcacgagaggggcactctatagaacaactctgtgcaacagctgcaatggcgggggaagcgataaaaactattcttgaggagtgatgcgggccttgacccgaaaggcgggaaagcgcctgccgataagttgtgataagacaataattcacgcgttaaggctagcggaattgattatcttttcgtataacgatagaaatgaaacgttgttttaattaaggagtggaaaagatgatcatcggaaatattcataatcttcagccgtggctaccccaggagttacgccaggcgattgagcatatcaaagcacacgttacggcagaaacgccaaagggcaagcacgatatcgaaggcaatcgactgttttatcttatctcggaagatatgaccgagccgtacgaagctcgccgtgcggagtaccatgcccgctatcttgacattcagattgtgttaaaaggtcaggaaggcatgaccttcagcacgcaacctgcaggcgcgccggataccgactggttagctgataaagacatcgcatttttgccggaaggcgttgatgagaaaacagttattctaaatgaaggtgattttgttgtgttttatccgggggaagtgcataaaccgctgtgcgcagtgggcgcgccagcccaggttcgcaaagcagtagtgaagatgctgatggcgtgatgacttttcgccgtaaataactcaaggtttacggcgagtttgtgaaaagagcgttttttgatatttttttgtgagtaaaatttgtaatgcttagacgttcttattcactcaaggagttcgtcatgagcaaaatatcagatttaaattattctcaacacattacattagccgacaattttaaacaaaaaagtgaagttttaaatacctggcgtgttggaatgaatgattttgcccgtattgccggggggcaggataacagaaggaatattctttctcctggagcatttttagagtttttggcaaagatatttaccctgggttatgtggattttagcaaacgctccaacgaagcgggtagaaatatgatggctcatattaagtcctcatcttattctaaagatactaatggcaatgaaaaaatgaagttttacatgaataatcctgtaggggaacgagcggattcacccaaggtgattatagaaatttcactttccactatcactactatggggactcgtcaaggacatacagccattatatttccacaacctgatggttcgactaaccgttatgaagggaagtcctttgaaagaaaagatgagagttcattacacctgattactaacaaggttctggcgtgttaccaaagtgaagctaacaagaaaatagcgcgtctattaaataataatcaggagttaaataatctacagaaattaaataatctacagaagttaaataatctactgaagttaaataatatacaggggttaaataatcctcaggagttaaataatccgcagaatttaaataattctcaggacttaaataactctaaggtgagttgtacagtttcagttgattctacgattacgggtttattaaaagaaccattgaataatgcattattagcaataaggaacgaacatctgctattaatgcctcatgtatgtgatgaatcgatttcatacttactgggcgaaaaaggtatacttgaagaaatagataagctctacgcattaaatgatcacggaattgataatgacaaagtaggtaacaatgaaattaatgacatcaaagttaacctgtctcatattcttattgattccttagatgatgcaaaggttaaccttacaccggtcatcgattcgattctggagactttttcaaaatccccatatattaatgatgtaagaatactggattggtgttttaataaaagcatgcaatattttgatgatactaaaaagataaagcatgcatgctccgtaataaatcatattaatcttcgcagcgatcagtctaaaatagctgagacattatttttcaatctcgataaagaaccctataaaaatagccctgaattacaggggttgatttggaataagttggttgtatatgtcaatgaatttaacttaagtaatcgagaaaaaacaaatttaatacaaaggctatttgataatgttgagtctatatttaatgaagtacctgtcagcattttagtgaatgatatttttatgaatgatttctttatgaaaaatcctgagatgattaattggtacttccctcagttacttaagagttatgagggtgaaaagatttattttgataatttaaaatatgatttaaatgataatgataaggaatctaataaagaaattttgaagaatcaaccagataatgttatcaaagaaaaactgaataatgaatacaaacttagatttagaatgatgcaaactatcttgcaatcgagagttaatgtattaccatatattaatgaacagcgtttaaataaactaaatccaccggaaaatttacgtatagcaatagaacactttgggtggaagaatagacctatcactgcataaaataatgtgatgccgggatggtttgtatttcccggcatctttatagcgatagcaattatttactgagcgtcgcgaccatcaccgctttgatagtatgcatacggttttccgcctgatcaaaaacaatgctggcggcagattcgaagacctcatcagtgacttccataccgccatgtaggccaaattcttccgccattttcttgccaagcgtcgtttggtcgtcatgaaacgcgggcaggcagtggaggaatttgacctccgggttaccggtcaactgcatcatcttgctgttcacctgatattcacgcagcaatgcaatccgttccgcccatttctcttttgcttcccccatcgacacccacacatcggtatagataaagtcagcaccttcaactcccttcgcgacatcttcagtcagcgtaatattcccaccattttgctgtgccagggcgcggcattccgtaaccagcgcagcttccggccagcacgcttgtggcgcgaccagacgcaaatccagaccggtaagcgccgcagcttcgagcatcgaattgcccatgttgttacgcgcgtcacctgcatagaccagcgtcatttcgttgaacgctttgccgggcaaatgctcctgcatggtgagaagatccgccagcagctgcgtgggatggaactcattggtcaggccattccataccggcacgctagcgtactccgccagtgtttcgacaatctcctgaccatagccgcgatactgaataccgtcatacatgcgaccaagcacgcgggcagtgtctttaatcgactctttatgaccaatctggctgccgcttgggccgagataagtaacgcgagcaccctggtcatatgcggcaacttcgaaagagcatcgggtacgagtcgagtctttttcgaagatgagcgcgatgtttttaccagtgagtttggcttcttctttaccgcttttcttatcggctttcagcttcgcggctaactgcagcaggctgttgagttcagctggcgtgaaatcgagtaatttcaggaaatgcttatgataaaacccggacatagatccctcctgtggctaacgcctcaatgaattaaaattcaatttatatggatgattattcatttgcaagtctaaagcataaatctttgtcacaaaggtggaggcaatgtcagtggtgtgtgacaataagagtatcggcaggacattaagaggaatgagccatggcaaacccggaacaactggaagaacagcgtgaagaaacacgtttgattattgaagaattactggaagatggcagcgatccggacgcgctgtacaccatcgaacaccatctttccgcagacgatctggaaaccctggaaaaagcagcagttgaagcgtttaaactcggttacgaagtgaccgatccagaagagctggaagttgaagatggtgatatcgtgatttgctgcgacatcctcagcgagtgcgcgttgaatgccgatctgatcgatgcccaggttgaacaactgatgacgctggcagagaaatttgacgttgagtacgacggatggggcacttactttgaagatcctaacggcgaagatggcgacgatgaagattttgtcgatgaagacgatgacggagttcgccactaattaagcgtagcgcatcaggcccaggtagttcctgcaacctggtgaatttgtagcccggataaggcattcatgtcacatccggcataaacaaaacgtacgttgttaatgttcgaatgcccgcgagttgaacacgcgggcatttttttagagttcgcgcaacatccgcacttcacaatcgacatggcccgtgcagccaagcgcatagtcgatatgctcaaagcccaaatgctcataaagcgcaatggcttcctttaaaaaagcggtcgtttccagatagcagcgtttgaaacccatctctcgcgcctgctccatcgccattaaggccagtttttttgccagccctttgccgcggatagccggaagaaaatacatcttttgcagttcgcaaatatccgactcactcccggttaatggcgctatcccaccgccgccgaccacttcaccctcgtactcaacgacccaatatgcatggccaggctgactatatacttgatacagctcgtcaagattcggatcggcgacggtgtagcctttatcagcggtaagaccgtattcggcggatacctgacgaatgacgcgggcgatagcaggattatcctgcagcgtcaggcgacgcattacaggtgattgcggcgcaatgttattcatagtttaacccaataaaaataaagtaattatacatttgtttaataccactctcttcttacgtacgcaagcgacttataaagtaataaagtttttgccagcctattactgataagagtattgtaacgtggcagaacattttactgtctgtatatataagttatatcaatggattttttaattcagggaatttttatggctcaagttattaatgaaatggatgttccgtcccattcgtttgtttttcatggtacaggtgagagatattttcttatttgtgtggtgaatgtgttgttaacgattataacgctaggtatctatttaccatgggcattaatgaaatgtaagcgttatctttatgctaatatggaagttaacggacaacgattttcttatggaattaccggtgggaatgtttttgttagttgtcttttttttgtttttttctatttcgcaatcttaatgacagtgtcagcagatatgccgcttgttggttgtgttttgactttgttactgttggttttgcttatatttatggcagcaaaaggactgcgtcatcaggccttaatgaccagtctcaacggcgtaagatttagttttaattgctctatgaaagggttctggtgggtgacctttttcttgccgattttaatggccattgggatggggactgttttctttatctcgacaaagatgctacctgccaatagttcaagtagtgttattatatccatggttctgatggcaatagttggtattgtttccattggtatttttaatggtactttatatagtctggtaatgagttttctctggagtaataccagtttcggtatacatcgtttcaaggtgaaattagatactacgtattgtataaaatatgccattctcgcatttttagctttattgccttttctcgctgttgctggttatattatcttcgatcaaatattaaatgcgtatgatagttctgtatatgcaaatgatgacattgagaatttacagcaatttatggaaatgcaacgtaaaatgataatcgcgcagttaatctattattttgggattgctgttagcacaagttatttaacggtgtctttgcgaaaccattttatgagcaacctgtcactgaatgatgggcgtattcgttttcgctcaactttaacgtaccacggtatgctttatcgcatgtgtgcgttggtggtgatatccgggattacgggcggtctggcttatccactgctgaaaatatggatgattgactggcaggcaaaaaatacgtatttgctgggcgatttggatgaccttcctttaatcaataaagaagaacaaccagataaaggcttcttagccagtatttcacggggagttatgccttctttaccatttctgtaagagataaaaaaggccggagcatgcgccggccttcgttttcatcactgtgttgattacagtgcggcgataaccgcctgctgttcaatcagcttcgctttcgcttctgcataaccttccagcttctcacgctctttcgcgatgaccgcttccggtgcgcgggcgacaaagccttcgttcgccagtttgttctcgatacggctgatttcaccttcaatcttcgccacttctttcgccagacgcgccagctcattttctttgttgatgaggccagccatcgggatcagcagctctgcgccgtcgatgatcttggtaacggaaaccggacctttgtcatcggcaggcagcacggtgatactttccagacgcgccagcgtttgcaggaagccacggttttcatttacgcgacgttctgcatccgcgctgcaaccacgcagcagcagctccagcggtttacccggtgcgatgttcatttctgcacggatgttacgtaccgcaacgatcgcctgcttcagccactcggtgtcggccagtgcggcttcatcgacctgagacgcatcgtactgcgggaacggttgcagcatgatggtgtcggcagtgataccgcaaagtactttcacacgctgccagatggtttcggtgatgaacggaatgatcggatgcgcgaggcgcagcagaccttccagtacagtcaccagcgtatggcgagtaccgcgcagttcggcttcggtgccaccgttcattaccggcttggtcagctccagataccagtcacagaactggttccaggtgaattcatacagaatgcctgcggcaatatcgaaacggaagctgtccagcgcttcgcggtacgctttgatagtctggttgaactccgccagaatccagcggtccgccagcgacagcgtcatttcaccgccgttgaagccgcaatcctgaccttctgtgttcatcagcacaaagcggctggcgttccacagcttgttacagaagttacggtagccttccagacgcttcatatcccagttgatgtcacgaccggtagaagccagcgccgccagggtgaagcgcagggcatcggtgccgtgcggctcaatgccgttcgggaactgtttctcggtgcgcttacggattttgtccgccagctgcggctgcatcatattgccggtacgtttttccagcagttctggcagcgaaataccgtcaaccatatccagcgggtcgataacgttacccttggatttggacatcttctggccttcgtcgtcacgaatcagaccggtcatgtaaacagtgtggaacggcacctgtggtttgccattttcatctttgatgaagtgcatggtcatcatgatcatgcgggcaatccagaagaagatgatgtcgaaaccagataccatcacgctggttgggtggaactgatgcagggcgtcggtattttccggccagccaagggtagagaaggtccacagtgcagaagagaaccaggtgtcgagaacgtcttcgtcctgacgcagggcaacgttggcaccgaggttattttccttgcgcacttcttcttcgttgcggccaacataaacattacccgcttcgtcataccatgccgggatacggtgaccccaccacagctgacgagagatacaccagtcctgaatatcgcgcatccaggagaagtacatgttttcgtactgcttcggtacgaactgaatgtcgccgttctcaaccgcttcaactgccggtttcgccagtacatcggcacgcacgtaccactggtcggtcagcatcggttcgataaccacgccgccacggtcgccgtaaggaacggtcaggtcgtgcggtttaatttcttccagcaggccgagtgcatcaaccgcagcaacgactgctttacgtgcagcaaaacgctcgagtttctggaactctgccgggatctcgctggaataaacgtcagattcgttacctttggtatcgaacacctgggcgctttcacggatatcaccgtcaaaggtcaggatgttgatcatcggcagggcgtgacgtttaccgacttcatagtcgttaaagtcgtgcgccggggtgatcttcacgcagccggtgcctttttccatgtcggcgtgttcgtcgccaacgatcggaatacgacggttaaccagcggcagaatgacatatttgccaatcagatctttgtaacgcggatcttccgggttaacagctacaccggtatcgcccagcagggtttccgggcgagtggtcgcaaccaccagataatctttaccgtctgcggttttcgcgccgtcagccagcggatagcggatgtgccacatcgaacctttcgattcgcggttttccacttccaggtcagaaatagcggtacgcagtttcgggtcccagtttaccaggcgcttgccacggtaaatcaggtcttctttatacagacgaacgaaaacttctttcaccgcattggacaggccttcgtccatggtgaagcgttcacgctcccagtcgacggagttgccgagacggcgcatctgacgggtaatggtgccgccagattccgctttccattcccagattttgtcgatgaaagcttcgcggccgtagtcgtgacgggttttaccttcttctgcggcaatcttgcgctcaacgaccatctgggtagcgatcccggcgtggtcagtaccgacctgccacagggtgtttttgccctgcatgcgctgatagcggatcatggtatccatgatggtttgctggaaggcgtgacccatatgcaaactgccggtgacgttcggcggcgggatcatgatgcagaaactttcctggctttcatcgccattaggcttaaagtagccctgcttttcccagtgctcgtaaagcggctgttcgatatcttgtgggttatatgtcttttccattatttccaggttgccgtattcaggttgaaaccagccacgcggtaggctttatagcgttcgcgcgccagttgtttcagagaatcttcataaggaacgaagtctaccacttctgtgaaagcggtggcaaaatctgcaaagcttgttcgcagactaatcaatatatcgcgcgggctgctgctacgcttttgcggccaggcgatctccaccggtgcaccgccgcgcggtccttctcccgctaaattatgcggaacaaagctttctgccggacgcgcccacagggcttcatccagccggtaagcctgcttttcatcttcacaggcgatgagcacgcgcttaccgctgcgccaacgttctgcggcaatttcacacaccagttgctcaacggcgcttaagccatcgacggtggtgtcattgtccagaaggtagaacgttgcgtttttcatatatggggcttcttgtggtggatttaaatattgctgcattcctcaccctgaaagatgagcaatgaatttctattgcgctcgatcggttccctctcccttagggagagggttagggtgagggtaaaacgcaaacttactcttcgccgttaaacccagcgcggtttaacaggaactgtgccagcaacgctaccggacgaccggttgcgccttttgctttaccagaacgccaggcggttcctgcaatatccaggtgcgcccagttgtacttacgagtaaagcgcgacaggaagcagcctgcggtaatcgccccaccaggacgaccgccaatgttcgccatatcggcaaaattggactccagctgttcctgatactcatcacccagcggtaaacgccatgcgcggtcaccggactgttcagaggcggcaatcagctcatgggccagcggattgtggttcgccatcagaccggtaatgtgatggcccagcgcgatcacgcaggcaccggtcagcgtcgccacgtcaatcaccgcttccggctcaaaacgctcaacgtaagttaacacgtcgcacagtaccagacggccttcagcgtcggtgtttagcacttcaacagtttgaccggacatggtggttaacacatcgcccggacgataggcacgtccgccaggcatgttttcgcagcctgccagcacgccgataacgttaatcggcagttgcagctccgcgaccatacgcatcacaccataaaccgccgccgcgccgcacatatcgtacttcatctcatccatgccttcggaaggcttgatggagataccgccggagtcgaaggttaaacctttacccaccagcacgattgggcgtgcatcttccgacgcgttgcctttgtactcaatcaccgacatcagcgattcgttctgcgaaccctgaccgaccgccagataagaatgcatccccagctctttcatctgctgttcgccgataacgcgggtgatgacattcttgctgtagctgtcagccagctggcgcgcctgagaggcgagataagcggcgttacagatattcggcggcatattaccgagatctttcgctgcttttatcccggcggcaatcgccagaccgtgctggatcgcgcgctcaccgctggtcagttcacggcgggtcggcacgttgaacaccattttacgcagcggacgacgcggttcgctcttgttcgttttcagctgatcgaaactgtagagcgtctcttttgccgtctcgacagcctgacgcactttccagtagttgttacggcctttaacgtgcagttcagtcagaaagcagaccgcttccattgagccagtatcattcagcgtattaatggttttctgaataacctgcttgtactgacgctcatccagctcacgttctttgccgcaaccaataaggagaattcgctcggaaagtacattcggaacatggtgcagcaacaatgtctgccccggttttccttccagttcgccccgacgtagcagggcgctgatgtacccatcgctgattttatcgagctgttctgcaatcggagaaaggcgacgtggttcgaagacgcccacgacgatgcaggcactccgctgtttctccgggctaccgctttttacactaaactccatgcactacgctcctgaatcttaaagacaacggcggtggctacagatagaattgcaagctttcgtaactcatgtccgctgttgcgatgacttcgtgttaatcttaacgttattacggcattggcacgtcagaacaaaatctgagaggtgaatccgttgagtataattatcttagcgacgatttcgacgactcaagagaataaatgacgtttaagccatgaaacaagctaaaatcctgcaaaagacgagtttttacgggcgtatttaaagtgataatcataagatatctggtgcgggagacgctcaaaagccagctggcgatactcttcatcttgcttttgatcttcttctgtcaaaagttagtgaggatcctcggcgcagcggttgacggcgatattccggcgaatctggtgctctcccttctcgggttgggcgtgccggaaatggcgcagcttatcctgccattaagcctgttcctcgggctgctgatgacgctgggcaaactgtataccgaaagtgaaattacggtaatgcatgcctgcggcctgagcaaagcggttctggtgaaagcggcaatgatccttgcggtattcacggcaatcgtcgcggcgattaacgtgatgtgggcgggaccgtggtcatcgcgtcatcaggatgaagtgttagcagaagcgaaagcgaaccctggcatggcggcgctggcgcaagggcaattccagcaagcgactaatggcagttcggtgctgttcatcgaaagcgttgacggcagcgatttcaaagatgtgttcctcgcgcaaattcgaccaaaaggtaatgcacgtccttctgtggtggtggccgattccggacatttaacccagctgcgcgacggctcccaggtcgtcactctcaaccagggaacgcgcttcgaaggcactgcactgttacgtgatttccgcattacggatttccaggattatcaggcgatcattggtcaccaggcggtggcgctcgacccgaacgataccgaccagatggacatgcgcacattgtggaacactgacaccgatcgtgctcgcgcagaactgaactggcgtatcacgttggtattcaccgtgtttatgatggcacttatggtcgtaccgctgagcgtggttaacccacgtcagggacgcgtactgtcgatgctgccagccatgctgctgtatctacttttcttcctgatccagacctccctgaaatcgaacggcggtaaaggtaagctggacccgacgctgtggatgtggaccgttaacctgatttatctggctttggcgattgttctcaacctttgggacaccgtgccggtccgccgcctgcgcgccagtttttcgcgtaaaggagcggtgtgatgcaaccttttggcgtacttgaccgctatatcggtaaaactattttcaccaccatcatgatgacgctgttcatgctggtgtcgctgtcgggcattatcaagtttgtcgatcagctgaaaaaagccgggcaggggagttacgacgcgttaggcgcaggaatgtataccttgctgagcgtgccgaaagatgtgcagatcttcttcccgatggcggctctgcttggggcgttgcttggtcttgggatgctggcgcagcgcagcgaactggtggtgatgcaggcttctggttttacccgtatgcaggtggcgctgtcggtgatgaaaaccgccattccgctggtcttactgacgatggcgattggcgaatgggtcgcgccgcagggcgagcagatggcgcgtaactaccgtgcgcaggcgatgtacggcggctcgttgctctctacccagcaaggcttatgggcgaaagatggcaacaacttcgtctacattgagcgggttaaaggtgacgaagagttaggtggcatcagcatttatgcctttaacgagaatcgtcgtctgcaatccgtacgctatgccgctactgcgaagtttgacccggaacataaagtctggcgtctgtcgcaggttgatgaatctgatctgaccaatccgaaacagattaccggttcgcagacggtgagcggcacctggaaaaccaacctcacgcctgacaaactgggcgtggtggcgctggacccggatgcactctctatcagcggtttgcacaactatgtgaagtatctgaagtcgagcggtcaggatgccggacgttatcagctcaacatgtggagcaaaatcttccagccgctatctgtggcggtgatgatgctgatggcgctgtcgttcatctttggcccactgcgtagcgtaccgatgggcgtgcgtgtggtcaccggtatcagtttcggttttgtcttctacgtactggaccagatcttcggcccgctgacgttggtttatggcatcccgccgatcatcggcgcactgttgccaagcgccagcttcttcttaatcagcctgtggctgttaatgagaaaatcgtaaccgaatgaacgaataaagggagcgaaagctccctttattattgttagcaaagtgtgcttcgttcattcctgaaaaataattaaaattcaatatattgcagtggggtgggcatgataagacgcgccagcgtcgcatcaggcaaagacaaatctcgcctgacttaccttcttctcccccccccagcaaactccccaacatcccgcgtacaatctgattcgtcacctggcgagcggcgcttttggccattgtctgcaccactccatctttcttcccgccgcgtggtccggtagtgccgaacaaaatatccttcaatccaccaagaatgccgtcatccaccgctacctctttccctttcgcggggggattattttgctgctcggtactggcctgaaagcctttttgcaacatctcataggcggattcccggtccacctcatcctcatatttgccatacaccggagagtgattaatcaagccattacgctcatcttccgtcaccggccccatccgcgaacaaggcgcaatcaccatcgcccgttccaccacagaagggcttcctttcgcattgagaaaagagatcaacgcctcgccggtgcccagtttctgaatcgccttttcggtatcaaatgccggattgacccgcatggtttgcgccgcagcttttaccgctttctgatctttgggcgtaaaagtccgcaaagcgtgttgaacgcgattaccgagctggccgagcacgttatccggaatatcggacggattttgcgaaacgaaccagacgcccacgccttttgagcgaataagccttatcacctgctcaatcttatccagcagtacctgcggtgcatcgttaaacagcagatgtgcctcgtcgaagaaaaacaccagttttggtttctccagatcgcccgcttccggcaattgttcatacaactccgagagcatccacaacaggctggcggcatacagtttcggcatctgataaagcttctcggcgctgaggatattgataacgcctttaccgttggcatcggtgcgcatccagtctttgatatccagcatcggctcaccaaagaagtgtgctgcgccttgctgttccagcgacaacagcccgcgctggatggcaccaaccgatgcgctactgatatttccgtactgattctggaaagatttggcgttatcgccgatgtattgggtaatcgcccgcaaatctttaaagtcgagcagtaacagcccctgatcgtcagcaatgcggaagatgatattcagcacgccagattgcacatcgttgagattcaacagccgcgccagcaacagcggccccagatccgaaaccgtcgcccgcaccggatggcctttctcgccaaagatatcccacaccaccaccggattggcatgcggttgccagtcattgacgccgatatttttaagccttgtgagcagtttttccgacgccgttcctgcctgcgcgataccggtcagatcgcctttcacatcagccataaacaccggcacgccgatttccgacaatgactctgccagtttttgcagcgtaacggttttacccgtccccgttgcgccagtaatcagcccgtgacggttagccattcccggcagtaaaaacagttctgtgtccggcgtgcgggcaattaacaggggttcgctcatgagatttcctccagttcctgcctggagtataggcaacggctgtgcactcttcaccgctaaattcagcagattgcgagacgccttccaaagagatttaagtgccgggcgacagcacccggcaaagggatcagaagtcggctttcaggactactcggtagcgagctttaccatcgcgtacatgctgaatggcgtcgttaattttcgacatcgggaacagttcggttgtcggcgcaaccttgctgcgggcggcaaagcgcatcagctttcgcagctcataaggcgtgccggtagcagaaccagagatgctgcggtcgcccgcaattaacgtaaaggccggaacagacagcggcgtgagaaccgcaccgaccgtatggaaattaccgccataggtcagcgcctcaaaataaggctgccagtcgaggctgacgttcacagtattgataatgagatcaaactgccccgacagggctttcagtgcctgcggatcgcggctattcaccactttatcggcacccatcgccagtacttcctgctctttcgccggattagaactaaaggccgtcacctcgcatcccattgcgtgcagaagttttatagcgatatgccccagcccgccaataccaattaccccaacgcggctggtagcagtgatatggtgcatcaacagtggtttaaagaccgtgataccgccgcacaacagcggcccggcggactcgatatcaatattttctggcagtggaatcacccattgccagtccgcacgcaacttctcggcaaagccaccgcgattcataattgttggtaccgcaccttgctcacagttgatctgattaccactaatacaggcgtcgcagtgaccacagctacgcgccgtccagccaatcccgacacgctgaccgacctgcaaacctttatcctgtgcggcgctcccgagcgccaccacgcgaccaatcacctcatgcccggcaatcagcggatattgtgaaaatccccattcattgtcgatcatcgatagatcggaatggcagatcccgcaataatccacctgcacttcaatatcttgtggcctcagctcaccgggatcgtactcataaacttccagttcgccgcccgcttcttttgcggcatagcttcttatcatcgacattttttggtccttctctggtgttgtctgggaagtgtagagcatggcagggcggggtgcctggagtgtgacaaaggttacacatcgctgtatgcaatgctgaaaatttcagcacttagcgaggtgcgagcaagctggcgcttgcatggtggcgtgcgacaggtataatccacaacgttttccgcatacctcttcagtgccgaagtggcgaaatcggtagacgcagttgattcaaaatcaaccgtagaaatacgtgccggttcgagtccggccttcggcaccattagtacttccaagaccatccgagaaattccaattatcccttaaaaatcaatgcttgtagcgatttttacgtcctgagtcgtccaaggttgtccgttgaaatccggatgtcattgggggcataattgggggcatcttaacttcgattagaaatgtgcccccaaatgaagctcaacgccagacaggtcgagaccgcaaagccaaaagacaaaacctacaaaatggccgatggcggcggtttgtatcttgaggtttcggccaagggttctaaatactggcgcatgaaatacagacgcccctcagacaaaaaagaggatcgcctcgcttttggtgtttggcctacagtgactcttgctcaggcaagagcaaagcgcgatgaagctaaaaagcccttagtacagggcatagacccaaaagccgaaaagaaagaagctcaggccgagaattcgggagcatatactttcgaaaccattgctcgtgaatggcatgccagtaacaagcgatggagtgaagatcatcgatcgcgcgttcttcgctatcttgagctttatattttccctcatatcggttcgtccgacattcgccagctcaaaaccagccacctgttagccccgattaaaaaagttgatgccagtggaaagcatgacgtcgctcagcgcttgcaacagcgcgttacggccattatgcgttatgccgtgcagaacgattacatcgactcaaatccagccagtgatatggccggtgcgttatcgacaaccaaagcgcgacattaccccgctttaccctcaagccgattccctgagtttcttgcacgtcttgctgcatatcgtggccgtgtaatgacacgaatcgcggttgagctttccttactaacttttgtgcgttccagtgagttgcgtttcgcgcgttgggatgagttcgacttcgataaatctctttggcgtatacctgcaaagcgagaagaaattaagggcgtgcgttactcttatcgtggcatgaaaatgaaagaggagcatattgttcctctcagtcggaaggctatggttttattagagcagctcaagcaaattagtggtgataaagagctactgttcccgggggatcatgacgcaactaaggttatgagtgaaaacacggtaaacagcgcattgcgtgcgatgggctatgacacgaaaactgaagtttgcgggcatggattcagaacgatggcgcgcggtgctatgggtgagtcagggttgtggagtgatgacgcgatagagcgacagctgagccattcagaacgtaataacgtgcgtgcagcttatattcatacttctgagcatttggatgaacgacgtttaatgattcagtggtgggctgattatcttgatgagttaaataataattacattactccatttgatttcgctaaaatacaaaaaaattattaatctttacatggaagggctgaaagaacagcccttctattatatttaattatttttcagcaatcctttatcttctaattctgtatagatagctagcggtaattttaaggaatcataatcattattccttaaccattccttcgccgcacttaccgaagggtttgagtttggaatgatattctctagatacgatgctgtaattctagataaccctagttcgatgaatacttgccctgcgatagatgaaactcctagttcaagtgataatggaaaatcatagatttcttcggattttttttcttggttattttcaattaaagcttggcgcaataagtcaatatatgccttgccaagttgcacatatttgaatcgcaagttatcttctacgaaatcaaaaacctctcttacagctctgtccacatttacaggcctagtggatttttttcttttttcttatttatggagagagagattatctccggcagagatttacccctcatccaattcaaagcaattgaagttagatagttagaaaatttagatgtgttatggttaaggatgtatttatttattctgctaaaaacaccaacataatttttgtaaacatcacctgaaggatggcgaggtataagttcgtcaactttaccttcctttattttctggataaatctattgtacaatcgttcctgtccaaatggatcaactgtccagttcagagttaaaacctcatgaggtattttaagtgattctaatgagatataagtggcattatcaatagtttcaagttttgatttatcagataaagttcgaaatgatcttttaagaaaattatgcaaatctccttttgcggctctggagattaaaagacctgccgctgcatcaatattactatatggcgtcactcctgaatgattatttttgtctaaccgtgatattactgtgtcaaaatcttcattaattactttctttaaagatgaagtaattttgaagtctattttggaatctaaaggcttggttacccaatcatcatagtcaataagataaacatttcccgaaaatgcataacctaatctacctgcccgccctgcgaaattccatagcgatgctggatctaatttttctcccctgtttcctcgtgtaggtgtatcaataaaaacattctttgcaggcagattaaccccttgaaaaagggttgttgtgcaaactaaaaacttcagtttattattcgtgaaatttttttctaatgtttctcttaataaacttggcattttaccataatggtatccaacccctctcaatacgaggtttgcaagagagtaatcctcgtggacatgtttttttataaattttgagagttcttgtaattcactgtcatcctctaaaagaggtaatccagaagatatttgcttagctacatcttctgcattttcagctccggttccgtaaactaaagacccctcattttttcctaattctaatgcgacagccgccaatcttgtattttcattggcgaaaccccttgtcgattctatttctccgatcggtaatatgtctgaattgtctaataatgataattgtaagttgttttcttttgatggatcaactttgacgataattttgttttgaactacaggagatagatttgttttttcaatatggattgcatcgattccaataatatctgctaaatcatcaaaaccttcagcaccaggcgcgaggaaaacatattttgcattagggttttgtgtgctaattttatcaaggcagtcctgtaatatcattcccctaatttcgtcagaaattgattgtgcttcgtcaataactaccaagtctattttttcttcaaaattatcaagcaatacttgaagtctttcctgtgttaagacaaatatctgcttattatattcgttattaattgttggtatggatgttactctgacctcattttgatatggtaaagtcttgattataaatttttgtgttatttcatttactaaagcacgggttggtgctatataaatggcggaatttaattcgccgctaattattccgttggcgagcatttccacaactaagaacgattttccggctgatgttggagctgatatagcttgagggacattcgagtgcaatgactcccatactcttttctgaaagtttgttaatgttatttctttgttggagatctttattttattttcattttctatgaaagatctttttaagaaggcataaaaactttctggtataaatccattttcttgttgaagataagttgctccagggaagttgcccaaaactcttaaaagattttctgacatttgtttcaaataatcatcaccggttactacatttaaatggtatgcaatgctttgagctaaattcttatcttcatctgactcagattgagaaaacaaatatgcagattcaattaatcttttataaataactatgttttcatcgccaattttgctttgttttgtagcaaaagaggttcttttatgattttgcaaaaaagagtgtgcaaaaagaaaactgaggtcgtttttgaactctaaatgtttttttatttggctaatgatttcagcagctaaagtgttcaccagataactcctttgcaaaatctaatttaaaagcatcaacgtcaggtaaggcaaagatgtacgctctacatttttgcggagttgctcctgctttggcgagatcgttcgtaataatttttattttttcttcaaaagtgctgacgtaatttttttaaagtggtctaaatgaatggaaagtggggactcatcatcaatagctattttagatttatagctttcttcattgtaggcaattattctaacgaaacgctctctgacatttgatgattcattagagtaaggatcaaagtattgtattgccttttttcgttcttctccttcaagagactctaaattactcaagtcctgcagtattctgtattcatttctacgactatttctatcgctttcaaacccactaactgattttgaaaattgttcagaaccgctatcaaactccctggtcattttagattctaggtaaaataccgtcaatgttcctttactgtctatggttgcatgaatgccatcaagaccaaagacaggcatttcagaggatgtcttaagagccatttttgagactaattgtgacgcttttaaaaaatgaattgctatacaatatgatattagctcaccaacttcaccataacgtaagttagcatttttcactcgttgttcgaacttttcagggggttcaccattttttatttttacagcactttctaatttgtatttcataaaaaggctgcgtgcttcccttgcaagttcactataaagtcttgcctcatcctttccctcacttcgtgctaactcttttcgtttaactaacactggatgaggaatgcaataatgaactaattctaaaaatagagtttccgcaagctctttgtctttaggtagatcttctttgaatccgaggcatagaagattaacttttactggatctgtagactgacactctttagcaagtaatacgatattactcaacccatatacaggattgtatattttatgtaatgaattagtatcttcagcattcattccctgttcaacctctaagtctaaagttgtgatttgaagccgttctaatcagttccttaggagttatctgatcactgaaatggcctttaatggtgccggggttcgcgataccgccaggacactgaaaattggtattaacaccgtcatccggactttaaaaaactcgcgccaaagcgaataacttcttcgtctgtttgaagtggcacactgaatttggccacctgaacagaggtgatatgctcacctcagaacaacacaggtgctccaatgaaaaaaagaaatttcagcgcagagtttaaacgcgaatccgctcaactggttgttgaccagaactacacggtggcagatgccgccaaagctatggatgttggcctttccacaatgacaagatgggtcaaacaactgcgtgatgagcgtcagggcaaaacaccaaaagcctctccgataacaccagaacaaatcgaaatacgtgagctgaggaaaaagctacaacgcattgaaatggagaatgaaatattaaaaaaggctactgtagattcaattggtcaacgcaacagttatgtgaaaacatggggttgcggaggttttttgaatgagacgaacatttacagcagaggaaaaagcctctgtttttgaactatggaagaacggaacaggcttcagtgaaatagcgaatatcctgggttcaaaacccggaacgatcttcactatgttaagggatactggcggcataaaaccccatgagcgtaagcgggctgtagctcacctgacactgtctgagcgcgaggagatacgagctggtttgtcagccaaaatgagcattcgtgcgatagctactgcgctgaatcgcagtccttcgacgatctcacgtgaagttcagcgtaatcggggcagacgctattacaaagctgttgatgctaataaccgagccaacagaatggcgaaaaggccaaaaccgtgcttactggatcaaaatttaccattgcgaaagcttgttctggaaaagctggagatgaaatggtctccagagcaaatatcaggatggttaaggcgaacaaaaccacgtcaaaaaacgctgcgaatatcacctgagacaatttataaaacgctgtactttcgtagccgtgaagcgctacaccacctgaatatacagcatctgcgacggtcgcatagccttcgccatggcaggcgtcatacccgcaaaggcgaaagaggtacgattaacatagtgaacggaacaccaattcacgaacgttcccgaaatatcgataacagacgctctctagggcattgggagggcgatttagtctcaggtacaaaaaactctcatatagccacacttgtagaccgaaaatcacgttatacgatcatccttagactcaggggcaaagattctgtctcagtaaatcaggctcttaccgataaattcctgagtttaccgtcagaactcagaaaatcactgacatgggacagaggaatggaactggccagacatctagaatttactgtcagcaccggcgttaaagtttacttctgcgatcctcagagtccttggcagcggggaacaaatgagaacacaaatgagctaattcggcagtactttcctaaaaagacatgtcttgcccaatatactcaacatgaactagatctggttgctgctcagctaaacaacagaccgagaaagacactgaagttcaaaacaccgaaagagataattgaaaggggtgttgcattgacagattgaatctacaaccgcgctcttgatgtcagactccctgaacagttttcgataatcgggaaactcagggcgcgttatcctgtggccactctctgccatgtgttcggggtccatcgcagtagctacaaatactggaaaaaccgtcctgaaaaaccagacggcagacgggctgtattacgcagccaggtacttgaactgcatggcatcagccacggctctgccggagcaagaagcatcgccacaatggcaacccggagaggctaccagatgggacgctggcttgctggcaggctcatgaaagagctggggctggtcagttgccagcagccgactcaccggtataagcgtggcggtcatgagcacgttgctatcccgaatcatcttgagcgacagttcgccgtgaccgagccaaatcaggtgtggtgcggtgatgtgacctatatctggacgggtaagcgctgggcgtacctcgccgttgttctcgacctgttcgcaagaaaaccagtgggctgggccatgtcgttctcgccggacagcaggctcaccatgaaagcgctggaaatggcatgggaaacccgtggtaaacccggcggggtgatgttccacagcgatcagggtagtcattatacgagcaggcagttccggcagttattgtggcgataccagatcacgcagagtatgagccggcgtggaaactgctgggataacagcccaatggagcgcttcttcaggagtctgaagaacgaatgggtgccggtggtgggttacgtaagcttcagcgaggcagctcacgccataacggactatatcgttggatattacagcgcactaagaccgcacgaatataatggtgggttaccaccaaacgaatcagaaaaccgatactggaaaaactctaacgcggaggccagttttagttgaccacaacagactacctgaagggagccgcggtcgcctagcagttgcagtagcaggagatcatccagccgcagtacaggtcacgatgactctggttaatgataccggctttgaccccgtattttccggctctatcgctgaatcatggcgtcagcagccgtgcacaccatcctattgttgtgactgggaggctgccaccatgcttcgcgctttccctctggcgaaaaagggagaaggacgggcccgtctgccttcactttatgccagcttcggtaagctgggtgagacaccgactcatgaagatatcattgataacaatcgatccatcaactggcctgtataacgtggctgccggtgattaagaaagctgcacctacctaagtagtagcaaacgcacactttttagaaaaatcgatggtcagaaactggattagcaattccgttccagggttgcttttgatttacgttggcgtctgatcattgatttatcctcaaaagcccaacctcattggtaatgaaccagctccgtgaatgtccgctctggcacagagcgaaattttttgatctcccccctgaaatctaaacttagtcatgtcacgtttttgggtttctaaaattttaacttcgcgtttttcgttgccgtaagggttatacagaaatgtccgttaagcagagttcaaaattgattgccgtgatcacgactggtttgaaagccgcgcccaagcctgtacagctctggtttgcgttgattatgaacctgtcagcctaaagcaagcggatggacgatgagtattggtaatctttcagagtccggaaaagttcagccccagtctgaacaggcttgctggcgccagtccagtttcattcagtcgtggtttggttcttacggcctgtgcaatctacctcattaggcacatcggcctgccagataccggctcggggtgtatttccgcttccacgctgaatactgttctcagcaatcctggggtcatcacctcttctggtgtgccttgcgccataacatgtccgtttgccattaccaccagttgatcgcagtaccggctagcctgattaaggtcgtgcagcacagcgaccaccgttttcccctgagtccggagttcgcccatcaaccgcatcaggtccacctggtgattgatatcaagataggtggttggctcatcaagtaatacaacgggcgtattctgggccaggaccatcgccagaaatgcgcgctggcgctgaccgccggaaagctcggttaaccgacgaacggcaagatgattgatccgggtctggttcatggcgacattaactcgtgcattgtcttcagcggagagacgcccccagagtgacagccagggattacgaccatacgaaaccagctcctggactgtgatcccctctggcgttaaatggtgctgaggcagcagcgaaagcctgcgggccaactggcgtgatgagagcatatttatgggattatcgccgagaaatacggtgccagactgcggcattaaaagccgcgaaaaacagtttaacagcgtcgatttcccgcaaccgttaggaccgatcagggcggtgatcttccccgttggcagtgagagtgaaacgtcgttaagtaccttgtctgtcccgtaactgaccgtcagattttcagttcgtaaagtcatttatcgcattctcacaagcaaccagacaaaccacggcgcaccgataatggcggtcagcacgccaaccgggagctccagtgggggatgaataattctcgccagcagatcggcaaccaccaacagcaacgcacctgtcagggccgaaacaggcagcagcctgcggtgacgtccaccggtgatgctacgcatcatatgcggcaccacgagaccaataaagctaatcgggccgcaggcggccacgccggtagatgtcatggcgacagctagtaacaaagcccagaatcgggtatggggcaccgacacaccgagcgtggtggcgcgcgcatcgccgagtgcaaggaggtcgagatcgcggcaaaaactcaggctcagcggcagaaataaaatcatcagcgggatggcaatcttcacaaagctccagtcacggccccataagctgccggtcagccacagcagggcgttgttcacatcctgcgggcgcgagagcatcagataatccgtcaggctggcccagcatgcagaaagcgccacgccggtgagcgccagcttcatcggctggtgggtctttgccagcatcttcagcaatatcaaccccgccatgccgcccgcaaaggccagcagcggcagcaccatcacgggcagtgacggcataagaagtagagcccccacagaggccaggctggcggcatggttaacgccgagaatatccggtgatgccagagggttgcgcacaatcccctgtatcagcacgcccgccacagcgagggctgcaccgacaaacagtgccagcagcaagcgcggcagtcggtactccatcaatacataataatgctcgcgtccggcctgccagtcggtcagcagcgcgcgccacggcacggggatcactcccatatggagtgataacagcgcacagcccgccagggcaagggtgatgaaaataaccagcgcaattttcatcctcgcctcctcacaagccagacaaagcaagggctgccaatcagcgccagcactgcgcctgcgggcagatctccggggaaggccagcgcgcgtgcgagtacatctgccagcagcatcagcgtggcccccagcagcatgctcactggcagtacgttgcgctgatcgaagcctgcccagaagcgcgccagatgtggcaccagcagaccgataaacgccaccggacctgccacgctgacgcacgcaccaaccagaagcagcactaacatattgatgaccaaacgtagcctcgtcaggttcactcccagcgtatgggcggtgctgtcgctgaggttgagcaggttcagttgattcgccagcagcaacacgacagagactgcagtgaccaccaccggcaagagctgccagacatcctgccagcgggcgtgggacactccgcctgccagccagtaaaagatgccgtaagcatgatcttcggccagcagcagggtgatgcgggtaaggcccatacaaaaggccgacagcgcgatacccgcgaggatcagtttgtttctgtcatgggtatgacgaaatccgcctcctgcggtcatgaccagcagccagctcacgccgcccccgcatgccgcgatgaacgacagagaatagcctgcaatcggcgtcggactcagcgcgctggtaagcgccatagccagcgccgcgccgctgttaatgccgagcagtgaaggagaggccattgggttgtgggtcagggtttgcagcagcgtgcccgcgagcgccaggcttgcgccgatcagaacggcgaccaggcttcgtggcaaacgaaggttttgcaccagcgcttctggtagcgttggcgtgtgtccaggcagcagggcgcgggttgcatctgctccggaaacaggaatggccgagtagcaaaacagactcagccagaaaataataataagtgctgcaacgggaagcccccacagcagcaccgggtgttttatcgcggtcatttcacaacggtaagcggctgatggtggaagatttttaccgtgtcagcggcaatacgctctgcagcaaaaataccgcgcatccgcgcccaggtgttactgtcgaccgaagcaacctgctgcttctgcgcggcggttaacatctgccagagcggatcttgttgccagcgtttaacaatgctctcttcgcgatagtgggcaaccagcagccaggcaggattgaccgccagcagttgctccaggccgatggacggcatggacgcacccgccatcgcagcgggaacgttcagccccagagaggccagcacgctgccggtccaggtctcctgagtatgcaggttgaattgctgttcgcgtgatgtgccaaaggccacgcgtgtccctttgggaagctggctggcccactgcgccatcctctctttatgttgttccagacgtgcctgcatctctcgctttttacccaccatttcgccgatgatagccgcagattgcaaattttcagcgtaggtttcgttgcgggacttaagcagcagtaccggcgcgatttgctgcaaggcgatgtaaacccccgcatggcgactgctgtcggcaatgatcaggtctggtttcagagcggcaatggcttccaggctcggctgcgcgcgcgttccgacggactgccacggtttcaggtgcgcacgcacttcgggcaggatgcgttttgcatcgttatcgtcggcaataccgatcgggctgacgtccacggcggccagcgcatcggcgaacgagagttccagcaccacaatccgttgtggcgttttttcgagtgtaaacgtgccgtgttcgtcctgaaccatggcggcaaaggcgtggctgatcaccagcagcaggcctgcaaaaagaaaacggataaatgccaacataatcacattccagctaaaagcccggcaagccgggcgttaacacatcagaacttcaacgacccctgcatatacagcgtgcgcggctggcctgcatagatgcctttgttgttgtcgtcataagagcggatgaagtagtcctggtcgaagatgtttttcacaccgaatgccaggttcagatctgccatctgcgggccaaagtcatacgccacgcgtgcgccccagagcatgaagccgggaatgcggccggtactgccgtcggcgctctctttcaccgtattggcgttatccgcaaactggctggactggaaatcgctgttcagattgaacgtccagtttcctggcttgtagtccacgcccagcgtgcctttatgtttcggggagaatggtaccagattgccgtaggtgtcgcctttctcgcggatttccgcgttcacatacgcatagctggcgtagatggaaacgttatcaagcgttggcgttatcgtacccagatcgtaacgtgcctgcgtttccagcccggtatggcgcgttttgccacgtgcagtgacggtgtcgttggtctggttggagtcgtactgattgttaaagttaatcaggaacagccccatttccgccgtcagcgcgccgtcgtcgtagcgggtaccgagttcccaggttcgcgctttttccggttccacattgccgctttgcacagccttgccaatctggctgtactgtacggtgccgaacgagccttcagtgtttgcataaagattccagctgtcagtcaggtgatagagcacgttcaacgccggaagcggtgcgttatagctcacttcttcgtgcgtgcctgtgatggcgttgttctggtatgactcgatatgttcgaaacgcatacccggcgtgatggtccagttgccgatgtcgattttgtcatccagataccaggcgtgcgcctcggtgccggaacgcgtatcgcggtcgtaagggcttgagccggacggcaactgcccgctgctggtggcggtgtagtaacgcatttcatgcgttgattcattcaaatagcgatagcccacgcccacttcgtgcgcggaagggccgatcataaagatctggctgtagcgtggctcaataccgcgcacccagtagttacgcggcgagagggtgatgcgtttgccttgctccaggtagccgctgcgcagggtttgggtgtagaacccctgaatgttgaatttatgctggctgtctggctggaactggtagcccaggctcgccagcttgcgacgaccccagaagcggtcatacgggcgggtggattgccagcgatcggcgtcgtaatccgcgcgagacaggccaccgggcatgtcggcttcaccgtcgtaatattgcagcaggctgttgaaggtgtgcacctcatccggcgcatatttgcttttcagcatcaggtcgtcgatgcgggtggcgctgtgctcgcgccagtcactgccgcgcgtgccggagtagagcagcgcggtgccaaaaccgttgtccgctgtgccgcccaccatcaggttgtgcgtctctttcgggttgttttgtgaagaggttgggctgagctgaccttccacgcccgcctcgataccaaagtcctgcggaatggcacgggtaacaaagttcaccacgccgcccacgctctgcggtccgtaacgcaccgcaccaccaccgcgtaccacgtcaatggcatccatgttgccgagcgaaacgggagccagtgaaagctgcggctgaccgtaaggggcgaaggggacggggatgccgtccatcaggacggtcgagcggctggcgaggcgcgggttcaggccccggatgccaaagttcatcgccaggtcgtggctgccggtgccgttgttttccggcgcgctgacgccagggatgcggttaagtacctcacgcatggtggttgcgccggttttggcgaaatcctcacggcggatcacgtcacgcgcgccagcatgttcaaatacgtcgttttcacgcgcatcacccagccagtcgccgaccacggtcagggcatcttcttttggtgcgggcgcgggctccagcgtccagctgttatttcccagcggttttacctgcagtccgctgccgtccagcagttgttgcaggccgctctcgacgtcgtaatcgccgtgcaggccgttgctctgcttgccgcgcgtcaggctggcgtcaaccgagagggtaaatccgctgtgtgcggcatactgattgagcgctttatcgagcgatcccggtgcgatattaacctgtgcagcaaaagcggaaaacgagagaccggccagcggcagcaggctcaggcgaatggtgttaaccaaaggtgttgttttacgaaaaacgcgtaacggcgtcataccttccccatcatcatttttgttgtgttcagctatgagtcgaacgagaagggtaaaaaggacaatcgaaataagaattattttccttacagtggtgaaatgtttatccagtaccgcgtaatagactgaattttaacgggaagcgtttgcgcgataacgttcaggatcgcatcggtatttttcagcgggaacgtcccgctcaggcgcagcccggcaacggcgggatcgcagcgcagcacgccgttgcggtaacgcgttagcgtggctatcacctcacccagcggtttatcgctgaagctcaggatgtccttcgtccagcttgtactctcgtcatccagcggtttcactgcgccaaactcagaggcgctgaactgcaggctttcaccagcgttcacgatgcgtttttgcgcgggggcactggcgagaagcacttccacagcgtgctgctgcacgtcaagctgcgtgaaattatcctgctggcggacggtaaattctgtccctaaagcagtgagctggccctgacgggtcaggacacggaaggggcgttgcagggcatcttttgcggtagtaatggcgatttcaccgtaccagagccggacggtgcgctgatgcgcatcaaaacgcacatccgccgcgctttgggtattcagcgtgagcagggagccatcttccagttgctgacggctgactgtgcctttggcggtgcggtaatctgcccgcagaccttcgccggtttccgactgccagagctgccagcctccgccagcgccgagcaacagcagtaatcctttcatcacgtgacggcgggtgaggcgggtatcgtgcaacgcccggctggcaacgtcgccaggcacaccgccaagctggttgcgcaggttttcaacctgctgccaggcccactggttatcctgatcctgttcataccactgttgccagcgcgcttcctgttgtgggctgacgcgctcgccgcttagcacggcataccagtgggaagctgaacgcagcgcctgacggcgggaatcggttaacaaaggattcataacccatactccagacggaacagcaggcagtgctcgacggctttcgccacgtattttttcacggagctgatggaaacaccgagtttgtgcgcaatctcgctgtatgtcagaccatccagttgcgaaagcagaaacgcttcacgtgttttgccgtttagcccgtccagcatgctgtcgaggagttgtagggtctcgagttggctttcgcgttcctcaggtgaaggcgctcccccctccggcataagcgccagcatctccagatacgctttttccagcgcgtttcggcgaaacaggtccaccatcacgcgtttggcgatagtgcagaggaaggagcgaggatcgcggatcgtcgagagcgtttcgctgaccattacccgcaaaaaagtgtcctgggcaatgtcatctgcatcaaaagcagactggagtttgcgcgtcagccagcttttcaaccagccgtgatgtgtgccataaagcgactcgaacgttaaggaagctgtggtagtggcgcggtcagacatgcggagtgcatcaaaagttaattatcacgtagtcatattaatatgagaatggttatcattacaattggaaataaaattgtttccaatagacatttttaacatgttgtttttctaagtgttataaggtaggtataaaatgggatggagcctctgcttctggcatgtgtcggtcagaatgactcatgatgtggtctgctattattgacatcctcactgccctaaaggatggggatttcggtaatgctgccaacttactgatttagtgtatgatggtgattttaaggtgcttgcgccgcatccggcaatcaatgcctgatgcgacgctgtcgcgtcttatcaggcctacaactgttgccgacccgtaggccggataaggcgctcgcgccgcatccggcagtgtttacccgcggcgactcaaaatttctttctcataagcccgcacgctctccagccattcgctacctgctggcgtatcgtgacgttggcaatacatttcccagaccgcctgccacggcaacgatttctgctcttccagcagtgccagacgcgcagtgtaatcgcccgccgcttccagcttgcgcagctcagcggtaggttccagcaacgcacgcagcagggcttttttcatattgcgtgtaccaatgacccacgcggcaatgcggttgatagaggcatcgaagaagtcaaggccgatatgcacccggttaaacagatcgtgacgcacaatctcactggcaattgcctgggtttcatcatccagcagcactacgtgatcgctgtcccagcgaaccggacggctgacgtgcagcagcaactgcggcacatacagcatggcggcggaaatcttgtcggaaatcacttcagtcgggtggaagtgcccggcgtccaggcacagcgcagtctggcggctggtggcataccccatgtaaaactcattggagccaaccgtgtagctctctgcgccaatgccaaacaatttgctctcaacggcgtcgatatggtgcgcagggtttagcttctcgctgatcacctcatccagtgctgccagcagacgctgacgcggggcgagacggtcaacggtgatatctttcataccatccgggatccagatgttcatcaccgatggtgtgccgagttgctcgccaaaataggccgaaacgcgacggctggctttgcagtgatcaatccagaactggcgaatgctgtcgtcggcatgggaaagcgtaaagccatcggcgcttagcggatgcgagaaacaggaggggttaaaatccagaccgagctgattggctttcgcccattcaacccagtttttgaagtgctctggtttgatctgatcgcgcgagactggcgtgtctgattccagatagatggcatgtaaattaagccgtttcggccccggaatcagccgcatagcctgttccagatcggcacgtagctcactggcattacgcgctttgcccggataattaccagttgcctgaatcccaccggtcaatgaaccttccgggttttcaaaaccggaaacatcatcgccctgccagcagtgcattgaaacgggtaaacgatcaagttggcgcagcgcctcctcgacatcaatccccaccgccgcgaaacgctgtttcgccagctcccaggcctgttccagttgagtggtcatgcgcaaagctcctttgtctttcgtgtagagtgaatccgcgccacgtagtgcgcaatttcactgtcaggattaggggtaaaggtggtcagattcgcggtggtgctgacgacctgacggaaatcatccacattgttgagttcatccagcgtcattaactggatgccgatattgccgagcgtcgaggcttcaacaggcccggcgatcacccgaataccgcaggcatcggcacatagctggttgagcagcgtgttctgacagcctccgccgacaatatgcagttgcgagaaatcttcaccgcgtagctgcgccagctcatgcaacacatcggcatacagcagcgccagactgtcgaaaatgcagcgcgccagttcagcatcactttccgggatcggttgcgccgtttcccgacacgcagcctgaatttcgctgcacatcgcctcaggattaataaagcgatcgtcattgggattgatgatgaagcggcaggccggaagtgactgtgtcgcgacgataagcgccgggagatcgttgattttccgctccttaagcacccgctgaagcagccataagcccataatatttttcagcacccgatagcgaccttccgccccgccttcattggtgatgttggctgccagcgccgtgtcattggtaaatggcgtctggctttcgaagcccatcaatgaccaggtaccagaagagagataagcggcgcgtgaaccgtttaacggcgaggcgataaccgcgctggcggtatcatggctggcaacggcgaccaccggaatctcattaccctgcgggcaaatccagtgacctatgacattacccggatgcgtcgggcgaccaaaccaggctttgttggcaccgctccacgccagtagcgactcgtcccagtcgtcgctattgatattgaccagttgcgtggttgtggcgttggtgtactcccagttcatcttgccggtaaggcgataactaaaataatccggcattagcagagcgtgagcaatgtgtggaataagttcaggttgttgctccgtcagcgcccgtaactgataaagcgtattgaagggcagaaactggatgccgctacgttgataaatatcgcgtttgccgagttgttgttgtgcctgcgccatcaggccattggtgcggctatcgcgataagcaacgggcaggcccacacgctgaccctgttggtcgagcagcacaaagtccacgccccaggtatcaatcccaatgctatcgatacgaatcccttcctcgcacaccttgtttaatccaaggcgaatggcactttccaggctatccacatcccaggtgacatagccgttctgactatgcagcccattgttaaaacgatggatttcgcgcagcgtcaggctgcggcattcacgctcgtaacgcgccagcatcacgcgcccactggatgcgccgagatcgacggcgacacaattgcgaaaggtcataatgtgatcctgctgaatttcattacgaccagtctaaaaagcgcctgaattcgcgaccttctcgttactgacaggaaaatgggccattggcaaccagggaaagatgaacgtgatgatgttcacaatttgctgaattgtggtgatgtgatgctcaccgcatttcctgaaaattcacgctgtatcttgaaaaatcgacgttttttacgtggttttccgtcgaaaatttaaggtaagaacctgacctcgtgattactatttcgccgtgttgacgacatcaggaggccagtatgaccgtattacatagtgtggatttttttccgtctggtaacgcgtccgtggcgatagaaccccggctcccgcaggcggattttcctgaacatcatcatgattttcatgaaattgtgattgtcgaacatggcacgggtattcatgtgtttaatgggcagccctataccatcaccggtggcacggtctgttttgtgcgcgaccatgatcggcatctgtatgaacataccgataatctgtgtctgactaatgtgctgtatcgctcgccggatcgatttcagtttctcgccgggctgaatcagttgctgccacaagagctggatgggcagtatccttcccactggcgcgttaaccacagcgtattgcagcaggtgcgacagctggttgcacagatggaacagcaggaaggggaaaatgatttaccctcgaccgccagtcgcgagatcttgtttatgcaattactgctcttgctgcgtaaaagcagtttgcaggagaacctggaaaacagcgcatcacgtctcaacttgcttctggcctggctggaggaccattttgccgatgaggtgaattgggatgccgtggcggagcaattttctctttcgctgcgtacgctacatcggcagcttaagcagcaaacgggactgacgcctcagcgttacctgaaccgcctgcgactgatgaaagcccgacatctactacgccacagcgaggccagcgttactgatatcgcctatcgctgtggattcagcgacagtaaccacttttcgacgctttttcgccgagagtttaactggtcaccgcgtgatattcgtcagggacgggatggttttctgcaataacgcgaatcttctcaacgtatttgtacgccatattgcgaataatcaacttcgttctctggccgaggtagccacggtggcgcatcagttaaaacttctcaaagatgatttttttgccagcgaccagcaggcagtcgctgtggctgaccgttatccgcaagatgtttttgccgaacatacacatgatttttgtgagctggtgattgtctggcgcggtaatggtctgcatgtactcaacgatcgcccttatcgcattacccgtggcgatctcttttacattcatgctgacgataaacactcctacgcttccgttaacgatctggttttgcagaatattatttattgcccggagcggctgaagctgaatcttgactggcagggagcgattccgggatttagcgccagcgcagggcaaccacactggcgcttaggtagcgtggggatggcgcaggcgcggcaggttatcggtcagcttgagcatgaaagtagtcagcatgtgtcgtttgctaacgaaatggctgagttgctgttcgggcagttggtgatgttgctgaatcgccatcgttacaccagtgattcgttgccgccaacatccagcgaaacgttgctggataagctgattacccggctggcggctagcctgaaaagtccctttgcgctggataaattttgtgatgaggcatcgtgcagtgagcgcgttttgcgtcagcaatttcgccagcagactggaatgaccatcaatcaatatctgcggcaggtcagagtgtgtcatgcgcaatatcttctccagcatagccgcctgttaatcagtgatatttcgaccgaatgtggctttgaagatagtaactatttttcggtggtgtttacccgggaaaccgggatgacgcccagccagtggcgtcatctcaattcgcagaaagattaattcgccatgccgatgccgacgatgttagcggcgacaataatcaccacacaaccgaggctcaacaccgttaccggacggcgtcctgcattgttccactctttcagcaccagcccgacgataccgccgcacaatacatagaaactcatatgcagcatccaactgatgtagtcatactgcgccggaatgcgggcgtggccccaggcatagaaaaagaattgcagataccacatcaacccgcccagtgccgagagtaacacattgtgaatgatcagcggttttgccagcgagaagtcggcttttagcgacaaatccttcacttttgccagacgaataaaacagaaaccgaggttaatgatcgcgccgccgcccatgatgacaacatagcttggcagagcgacatacagtggatcgacgccaagtgcggcagcggcttcatgcatcggttttgcggcgttcatcgcaaaggacatcccggcagagaaaatgccgcacatcaccgccagcaccagcccttttttcagattgaactcttcggctttaatgcccatcttgcgctctttcaactgcccggctcgagttacaatccctacgccaatcagcgccaccagaacgccgagcaacgtcatgcgtccgccttcggtattaatcagcacatcgaaattgccgttgataattggcgtcatcagcgtaccgacaatcaacgtaatgccaatggcgatgccaattcccatcgacatgccgagataacgcatggtcaggccatagttgatattaccgatcccccacatagcgccgaacagaaaaacaggcagcagcgtagagagactaaacgagctgtaatacgcccagaaatccggtagtaacagggcgctgatggcccacggcagaataatccacgaaacaatcccaccgactgaccacatggtttcccatgaccatttttttacttttttgaacggagcgtaaaaacaggctgcactggccgcgccgatcaaatgccaaaatatccccatcgtaatcgcgttactcatcttcttatcctcatcatttttcgtcgcttcacatctccgacgagatgagtgtaaaaatcgtgctgtcgattaacctttcgcctgttgccgccgttgtcgatttactggcaatcacggcattaagtgggtgatttgcttcacatctcgggcattttcctgcaaaaccatacccttacgaaaagtacggcattgataatcattttcaatatcatttaattaactataatgaaccaactgcttacgcggcattaacaatcggccgcccgacaatactggagatgaatatgagctataccctgccatccctgccgtatgcttacgatgccctggaaccgcacttcgataagcagaccatggaaatccaccacaccaaacaccatcagacctacgtaaacaacgccaacgcggcgctggaaagcctgccagaatttgccaacctgccggttgaagagctgatcaccaaactggaccagctgccagcagacaagaaaaccgtactgcgcaacaacgctggcggtcacgctaaccacagcctgttctggaaaggtctgaaaaaaggcaccaccctgcagggtgacctgaaagcggctatcgaacgtgacttcggctccgttgataacttcaaagcagaatttgaaaaagcggcagcttcccgctttggttccggctgggcatggctggtgctgaaaggcgataaactggcggtggtttctactgctaaccaggattctccgctgatgggtgaagctatttctggcgcttccggcttcccgattctgggcctggatgtgtgggaacatgcttactacctgaaattccagaaccgccgtccggactacattaaagagttctggaacgtggtgaactgggacgaagcagcggcacgttttgcggcgaaaaaataatcatttgccgcctgctgcaatgaggcgtataggccgcatatcagcttaaaaaatgaaccatcgccaacggcggtggtttttttgtgatcaatttaaaaataaaaacaatgatccgataaaaataaaacagtgtttcaattgatgtggttttgatcacttttattgattaaatgaatgtctatcttcgtttccatcaacactgatgctccattgaggaattacgcatcagcccttaaaaatatgccgacaggtgatggaaatgcagataaaacgctcgattgagaaaatcccgggggggatgatgctcgtcccgctattccttggcgcactgtgccacaccttctcgccgggggcggggaaatattttggagcattcaccaacgggatgattaccggtacggtgcccattctggcggtgtggtttttttgcatgggggcgtcaataaaattaagcgcgacgggaacggtactgcgtaaatccggtacgctggtggtaactaaaattgccgtcgcgtgggtggttgcggcaattgcctcgcgtattattccggaacatggtgttgaagttggattctttgccggactttcaacgctggcgctggtggcggcgatggatatgaccaacggcggactttacgcttccatcatgcagcagtacggtacgaaagaagaagctggggcatttgtgttgatgtcgttggagtccgggccgctcatgacgatgattattctgggcactgccgggattgcctcgtttgaaccgcatgttttcgtcggcgcagtattaccgttcctggtgggctttgcccttgggaaccttgaccctgaattacgagaatttttcagcaaagcggtgcagacgctgattccattctttgccttcgcactaggcaataccattgatttgactgtaattgcccagacaggtttgctggggatcctgttgggtgtggcagtaattatcgtgaccggtattccgttgattatcgccgataaattgattggcggtggcgatggcactgccggaattgccgcttccagttccgcaggggccgcggtagcgacacctgtgctgattgcagaaatggtgcctgcgtttaaaccgatggctccggcagcaacttcgctggtagcgacggcggtcattgtgacttcgattctggtgccaattcttacctctatctggtcacgtaaagtcaaagccagagcagcgaaaatcgaaattttaggtacggtgaaataaacctgcttccttaatccccacagccggatgaactaacgttcgtccggtttgctattgagctcctgcctggatacttaccgcgaaaacagcacgcctgacataaaataaatatggtctaatggggaaatttctcgtggagagggaacagatgcgatatccggttgatgtatacacaggcaagattcaggcttatcccgaaggcaaacccagcgcaattgccaaaatccaggttgatggtgagttgatgctgacggagctggggctggaaggtgacgagcaggcggagaaaaaggttcacggcggaccagacagagcgctgtgtcattatcctcgtgagcattatctctactgggcgcgggaatttccggaacaggcggagttgtttgttgcgcctgcgtttggcgaaaatctctcaaccgacggtctcacggaaagtaatgtttatatgggcgatattttccgctggggagaggcattaattcaggtcagccagccgcgctcgccttgctataaactcaattaccattttgatatcagcgatatagcgcagttgatgcaaaacacgagtaaagtgggatggttgtatagcgtgatagcgccagggaaagtgtctgcggacgcgccgctggagttggtttcccgtgtcagcgatgtgaccgtgcaggaggctgccgccatcgcatggcatatgccgtttgatgacgatcagtatcaccgtttactctccgctgccgggttatcgaaaagctggacgcgaacgatgcaaaagcgccgactgagcggcaagatcgaagatttttcccggcggttgtggggaaaataacccccggagtgtaggcctgataagacgctatcagcgtcgcatcaggcatcctgctcaaatgccgtatgcggcgtaaacgccttatcctgcctacaaatgcggagtttaactccgcttatacagcggcaaccaaatcaccagccgtaaaccgcccagcgggctgtcttctgctttcacccagccacgatgctgctgaatggcggtttcaacaatcgccagtcccaaacctgtaccgccagattcacgatcgcgcgcttcatcggtccgatagaacggacggaaaatctgttcgcgatcttccgggctaacgccaggaccatcgtcgtccaccgtaatggtgataccgtctttatctaccgcaaagcccacttcaatcttcgtatgggaataacgcagagcattacgaacaatgttttccagcgcactttccagggcgttcggattgccgtacagcggccacggcccaggcgggaagttaacagaaaacgacttgcccatctgttctgcttcgaacgccgcgttatccagcacttcgccccacaactggttagctttcaatgtctcgcttaccagcgcgtttttctgctgattacgtgacatcaccaacagatcgttgatcatgctgtccagacgttgcgcttcggtttcaatacgctccagttccttgctttcaccgctacgacggcgcagtaacgccgtacccagttgcagacgcgtcagcggggtgcgcagctcgtgagagatatcagaaagcagacgctgctgagaggtcatcatgcgctccagcgcggtgaccatctggttaaaactggcacctgcggcaaggaattcctgtggccccgcttccagttccgggtgctggcgtaagtttccctgggcaacttcatcggcagcatttttcagcttacgcgccggttttgccagactccaggccaaccacaacagcagcggcgtactgaccagcatggtgacaatcagcagtaatagcgggcggtcaaacagtaagttaatgaaatcggattgagaactgctggccggacgaatcagataaagttggtaattatcttcgccatcacgtacggagaacggaccgaccagttccacgcggccatactttttcttctgcggatgatcggcgttatcggcctgaccaataaagttacgaatgatctgcatttcgctgcgttcagcgccgatcacgcggccttcggtggtcactaataacaaacgctgtcctggcggtgcccacttatcaatcgcccggaacagacgccgccaccacattaaatcgttgggcggatcgttcgccagctccgcttcaacatgctgctcaatcatcagaccctgacgctgttcgctatccagaagctcggtcatctggcgtgaatcgagcttgggtaacatcaaaaccaacatcaacaccagcgccagcgtcagccagaagatggcgaagatgcgcgcggttaagctgcctatcatgaagcagaaaccatcaggtagccgcgaccacgcaaggttttaaaccacgggtgaccatctttacgatctggcagtttacgacgcaggttggaaatgtgcatatcgatagcgcggtcgaaaggcgtcaggcgtttgcccagcacttcctggcttaaatgttcacgggaaaccacctgacccagatgctgtgccagcaaatagagcagggtaaactcagtaccggttaactccagcgtttgcccgtcgaagctggcttcctgacggcctggattcagcactaaggcatcaacttccagtgtcggtgaaccgttgtcgttgttttgctgttgctcgctccagtgcgaacggcgcaggatcgcgcgaatacgtgccaccagctcacgatcattaaacggtttcgggagatagtcatctgcgcccagctcaaggccgagaacgcgatcaagttcactgccgcgcgccgtcaacataatgacaggcgtctggtgtgtctggcgaagtgcttttaatgtgtcgataccatttttcttcggcatcattacatcaagcaaaagtaaatcaatgctgtcgtccagaagatcaagcgcctgttccccatcgtgggcaacaatcacgttgaagccttccatctcgagcagctcctttaatagggaagtcagctctcggtcatcatcaactaacaggattttattcattgtttaaatacctccgaggcagaaattacgtcatcagacgtcgctaatccatgactttacgttgttttacaccccctgacgcatgtttgcagcctgaatcgtaaactctctatcgttgaatcgcgacagaaagattttgggagcaaatgatgcgcatagttaccgctgccgtcatggcctcaacgctggcagtcagttcattaagccacgctgctgaagtcggttcaggcgataactggcatccgggtgaagaacttacgcagcgcagtacgcagagccatatgttcgacggcataagtttaaccgaacatcagcgtcagcagatgcgagatcttatgcaacaggcccggcacgaacagcctcctgttaatgttagcgaactggagacaatgcatcgccttgtcaccgcagaaaattttgatgaaaacgctgtgcgcgcacaggcagaaaaaatggcgaatgagcaaattgctcgtcaggttgagatggcaaaagtccgcaaccaaatgtatcgcctgttaacgccggagcagcaagcggttttaaacgagaaacatcaacaacgaatggagcagttgcgcgacgtgacgcaatggcaaaaaagttcatcgttgaagctattgagtagtagcaactcacgttcccagtagtaaaccctgttttccttgccatagacaccatccctgtcttcccccacatgatgtgggggttttttttatcctcaatttgcctgctgcttaatgcattgcagatgatttgcttccgttatactagcgtcagttgatagcgggagtatttatgaatcaatcttatggacggctggtcagtcgggcggcgattgctgcgacggcgatggcttcgctgctattgctgattaaaatttttgcatggtggtataccgggtcggtgagtattctcgccgcgctggtggattcgctggtggatatcggcgcgtcgttgacgaatttactggtggtgcgatattccctgcaacctgccgacgataatcactcgtttggtcacggtaaagctgagtccctcgcggcgctggcgcaaagtatgtttatctccggttcagcactattcctgtttttgacgggtattcaacatctgatatctccaacaccgatgacagatccaggcgtcggggttatcgtgacaattgtggcgctaatttgtacgattatccttgtctcgtttcagcgttgggtggtgcgccggacgcaaagccaggcggtgcgggctgatatgctacattaccagtctgatgttatgatgaacggcgcaattctgctggcgctggggttgtcctggtacggctggcatcgcgccgatgctctgtttgcattgggaatcggcatctatattttatatagcgcgttacgcatgggatatgaggcggtacagtcattactggatcgcgcattacctgatgaggaacggcaagaaattattgatatcgtgacttcctggccgggtgttagcggcgctcacgatcttcgcacgcggcagtcagggccgacccgctttattcagattcatttggaaatggaagactctctgcctttggttcaggcacatatggtggcggatcaggtagagcaggctattttacggcgttttccgggatcggatgtgattatccatcaggacccctgttccgtcgtacccagggagggtaaacggtctatgctttcataatcagtataaaagagagccagacccgcattttgtgtataaaataccgccatttggcctgacctgaatcaattcagcaggaagtgattgttatactatttgcacattcgttggatcacttcgatgtgcaagaagacttccggcaacagatttcattttgcattccaaagttcagaggtagtcatgattaagaaaatcggtgtgttgacaagcggcggtgatgcgccaggcatgaacgccgcaattcgcggggttgttcgttctgcgctgacagaaggtctggaagtaatgggtatttatgacggctatctgggtctgtatgaagaccgtatggtacagctagaccgttacagcgtttctgacatgatcaaccgtggcggtacgttcctcggttctgcgcgtttcccggaattccgcgacgagaacatccgcgccgtggctatcgaaaacctgaaaaaacgtggtatcgatgcgctggtggttatcggcggtgacggttcctacatgggtgcaatgcgtctgaccgaaatgggcttcccgtgcatcggcctgccgggcactattgacaacgacatcaaaggcactgactacactatcggtttcttcactgcgctgagcaccgttgtagaagcgatcgaccgtctgcgtgacacctcttcttctcaccagcgtatttccgtggtggaagtgatgggccgttattgtggcgatctgacgttggctgcggccattgctggtggctgtgaattcgttgtggttccggaagttgaattcagccgtgaagacctggtaaacgaaatcaaagcgggtatcgcgaaaggtaaaaaacacgcgatcgtggcgattaccgaacatatgtgtgatgttgacgaactggcgcatttcatcgagaaagaaaccggtcgtgaaacccgcgcaactgtgctgggccacatccagcgcggtggttctccggtgccttacgaccgtattctggcttcccgtatgggcgcttacgctatcgatctgctgctggcaggttacggcggtcgttgcgtaggtatccagaacgaacagctggttcaccacgacatcatcgacgctatcgaaaacatgaagcgtccgttcaaaggcgactggctggactgcgcgaaaaaattgtattaatgatttcggaaaaaggcagattcctttagcctgaaaccgatgacagaagcaaaaatgcctgatgcgcttcgcttatcaggcctacgtgaattctgcaatttattgaatttacaaacttttgtaggccggataaggcgttcgcgccgcatccggcatcgataaagcgcactttgtcagcaatatgaggcggatttcttccgcctttttaacccccaacatatacccgcaagttatagccaatctttttttattctttaatgtttggttaaccttctggcacgctttgctcatcacaacacaacataagagagtcgggcgatgaacaagtggggcgtagggttaacatttttgctggcggcaaccagcgttatggcaaaggatattcagcttcttaacgtttcatatgatccaacgcgcgaattgtacgaacagtacaacaaggcattcagcgcccactggaaacagcaaactggcgataacgtggtgattcgtcagtcacacggtggttcaggcaaacaagcgacgtcggtaatcaacggtattgaagctgatgttgtcacgctggctctggcctatgacgtggacgcgattgcggaacgcgggcggattgataaagagtggatcaaacgtctgccggataactccgcaccgtacacttccaccattgttttcctggtgcgtaagggcaatccgaagcagatccatgactggaacgatctgattaaaccgggtgtttcagtgatcacgcctaatccgaaaagctctggtggcgcgcgctggaattacctggctgcctggggctacgcgctgcatcacaacaacaacgatcaggcaaaagcacaggattttgttcgggcactgtataaaaacgtcgaagttctggattctggcgcgcgcggctccactaacacttttgtcgagcgcggaattggcgatgtactgatcgcctgggaaaacgaagctctgctggcagcgaatgaactggggaaagataaattcgaaattgtcacgccgagtgagtctatcctcgcagagccaaccgtgtcggtggtcgataaagtggtcgagaaaaaaggtactaaagaggtggcggaagcctacctgaaatatctctactcgccagaaggtcaggaaattgccgcgaaaaactactaccgtccgcgcgacgctgaggtggcgaaaaagtacgaaaatgcgtttccaaagctgaagttattcaccattgatgaagagttcggcggctggacgaaagcgcaaaaagagcattttgctaacggcggtacgttcgatcagatcagcaaacgctgatttccccaggataattatcaaacccggtggtttctcgcgaccgggttttttatttgtcacgattttgcgttacccttgcatctctttgaggtacagggaaaaaaagatgaaaaaagcgggtcttctttttttggtgatgatagttatcgccgttgtggctgccggtattggttactggaaattaaccggtgaagagtcggatacattacgtaagattgtccttgaggaatgtttgcccaatcagcagcaaaatcaaaatccttcgccatgtgcggaagtcaaacccaatgccggatacgtggttttaaaagatcttaatggcccactgcaatatctgttgatgccaacgtatcgtattaacggaactgaaagtcctttgttgaccgatccttcaacgccgaacttcttttggttggcctggcaggcgcgtgattttatgagcaaaaaatacggtcagccggttcccgatcgcgcggtttctttggcgatcaactcccgcaccgggcgtacgcaaaaccattttcatattcatatctcttgtattcgtcctgatgtgcgcgaacaactggataaaaatctggcgaacatcagcagccgctggttgccactgccaggtggtttgcgcgggcatgaatacctggcgcgtcgggtaacggaaagcgaactggtacaacgcagcccatttatgatgctggcagaagaagtacctgaggcgcggaaacatatgggaagctacgggctggcgatggtacggcagagtgataactcatttgtattgctggcgacacaacgaaatctactgacgcttaaccgtgcttcagccgaggaaattcaggatcatcagtgtgagattttgcgttaaggcgaagagttaaggaaagtaagtgccggatatgaaatccggcacctgtcagacttaagcctgtttagccgcttctgcagctttaacgattactgcgaaagcgtcagctttcagagacgcaccgccaaccagcgcgccgtcgatgtctggctgagcaaacagttctgcagcgttagacgcgtttacagagccgccgtactgaatgatcacttgttcagcgatgttagcgtcaactttagcgatgtggtcacggatgaatttgtgaacagcctgtgcctgagccggagttgcagatttgccagtaccgattgcccatacaggttcgtaagcgataaccgcaccttcgaatgccgcagcaccctgagttttcagtaccgcgtcgatctgacgtgcgcaaacttcttcagttttgcccgcttcgttttcagcttcggtttcaccgatgcacagaaccggagtcaggccctgctctttcagcaccgcgaattttttcgcgatcagttcgtcagactctttgtggtaagtacgacgttcagagtggccgatgatgatgtactgtgcgccgatgtctttcagcatagcagcagaggtttcaccggtgaatgcgccggacaggttcaggtccacgttttgcgcacccagcatgatgtggctgccttcagcttcacgcttcgccatatcgatgtacatttccggtggtgcgattgcaaccgcacagccagcaacacctgccagctctttacgcaggttagaaaccagctcgtgaaccatgtggcggctgccgttcagtttccagttacccatcactaaaggatgtcgcattttaattctccacgcttataagcgaataaaggaagatggccgccccgcagggcagcaggtctgtgaaacagtatagagattcatcggcacaaaggctttgctttttgtcatttattcaaaccttcaagcgattcagatagcgccagcttaatcggttcaacagcgaaggtcagccccttttcgccgttgtccgcgacaacataacgcagtgcaccttctgtctcggtgtaataacgtttgtttttccccgccgttagtagcgactgcagttttttctggctttgtgttttggtcattaatggggtgagtgtgcggatcaccgctgccatatattcctgagctttcgctttcgcggctttttgctctggcccctggatgggtagccaggtcatttgaatgcttttgatttttaaggtaccgcgctccagcgctgtagaagcatacaagttctcgttaattttacttgcagcacgagtgagattggctttgtcgggactgctgtcgatggcacgaaattcgttcagtggcaggctgggattctggctgttaaagtcttctcgaaactggctgatggagagatcgaaagtaggggctccagccagcagataaggcgcggtcgttgccgtatctggtgtttgtgcatgcgccgttgttgtaacggttaatgcagaacataagagaaaaaacagcgtacaccctggcttcattgacagtaccttttgttatgactggctccgattaaaacgatatctgtcgcccttgtcaaaagggtagaatcctggaaaagacaaccatcaaggaacttacatgaccatacagcaatggttattctcatttaaagggcgtattggacgccgtgatttctggatttggataggcctgtggttcgcaggcatgctggtgcttttctcactggcgggtaaaaatttactcgatattcagaccgcggcgttttgccttgtgtgcttgctctggccaacagcggcagtaaccgttaagcgcttgcatgatcgcgggcgttccggcgcatgggcatttctgatgattgtggcgtggatgctactggcgggtaactgggcgattttaccgggtgtctggcaatgggccgtagggcgttttgtcccgacgttgattctggtgatgatgcttatcgatcttggtgcgtttgttggcacacaaggcgaaaataaatatggtaaagatactcaggatgtgaagtataaagccgacaataaatcaagtaattaacctttaatatatctcttactgctatttttttccgggattgttatttccacgatgcaaatgacaatacccggaaaatccttctgaactcttcaccttaagcaatatcaaaaaaaatggtaatccataagatcattacttgtttgttcttcccttaacggcgcattattcttaagtcgtaatcgacagagaggcgaatatacagaggtgccctatgaaagatgtcgtagataaatgcagtactaaaggatgtgcgattgatatcggtacggtgattgataacgacaactgtaccagtaagttttcgcgcttttttgccacccgcgaagaagcagagtcttttatgaccaaactgaaagagcttgccgccgctacatcctctgcagatgaaggggccagcgtggcctataagattaaggatctggaggggcaagttgagcttgatgcggccttcactttctcatgccaggccgagatgattatttttgagttatcactgcgttcgttagcttgatggagttgctttagaaggagttaaacatggcttataaacacattggcgtggcaatttccgggaatgaagaagatgccttactggtgaataaagccctggagctcgccagacataatgacgctcacctgacgttaattcatattgatgatggcttaagcgagttgtatccgggtatctacttccctgcaacagaagatattcttcaattgttgaagaataagtcggataacaagctgtataaactgacgaaaaatattcaatggccgaagacaaaactgcgtattgaacgcggagaaatgccggaaacactgctggaaattatgcaaaaagagcagtgcgacctccttgtctgtggtcatcatcactcatttatcaaccgtttgatgccggcatatcgcgggatgatcaataagatgagtgcggatttgctcatcgtgccgtttatcgataagtaaccgcttaccagtaatgctccgctgtcatatggcccggtcggcgacgtaaatgtttcgtcatctgccgggtctctttcagcaactgttgtgtatcgcgcaccatctgtggattgccgcacagcatcacatggctggtttctttattcatcggcaggccaatcgtgctttccagttccccactttcaattaatgccggtatccgtccggtgagcgaccccgctgccgtttcccgactgaccaccgtctgaatgcgcagttttccttcgtagcgtttttccagttcctgcatcagtggcaaatagcttaagtcggcggcataacgtgcggcgtgcaccaggaccagatttttgaagcgatctaaatctttacctagttgcagaatcgataaataagggccaatcgctgtaccggttgccagcatccatagcgtttcgcagtgcggcacttcatcgagcacaaagaatcctgccgcttcgctaaccacctgcacttcatcgcctggtttcagtgccgccagtcgtgggcttaatttgccatcggggacggtgaccaggtaaaactccagatcgggattatcgggcgagtttacataggagtaggcgcgctggacgcgttcgccgtcgatttcaaggccaagcttggtaaattgcccggcggtaaacggaagcacgggggcgtgaacggtgagactaaacagggcgtcggtccagttctgcactttagtgactttgcctgttacccaatcagccatgtttttctcctgttttgattgacttgccttatcttcgttctccgaacaaaaaaattccagtcccgaaggactggaaggctcaatcgatcaaatcaatcagaggatgtgcacctgcatttccgggtctttgcgatccagatagtggatggactgaatgcggcgaatggtgcgtgacttgccgcggatcagcagcgtttcggtagtcgcgatattgcctttgcggctaatgccttccagcagatcgcctttggtaataccggtggcagagaagatgacgttatcgctgcgcgccatatcgcccaggcgcaatactttaccggcttcgatgcccatcgctttgcagcgtgccagctcctgctcgccaatgcgacgattctcttcgttgtcgcctttgacgtcatgacgcgccagcagacgaccgttcatgtcgccatctaatgcgcggatcaccgccgcagaaactacgccttccggcgcgccaccaataccgtacagcacgtcaacttcgctgtctggcatacaggtgagaattgaggccgcaacgtcgccgtccggaatagcaaatacgcgtacgccgagttgctgcatttcagcgataacggcatcgtggcgtggtttagccagaatcgttaccgtcagttcgctcaacggtttgccgagcgccgccgctacattgcgcaggttatccgccagcggcaggttcagatcaatggtgcctttggctcccggcccgacaatcagcttctccatatacatatccggcgcattgaggaagcagcctttatcgcctactgccagcaccgccagcgcgttagcctggcccatcgccgtcatgcgcgtgccttcaatcggatcaacagcaatatctaccgcgtcgccgcgaccagtaccgactttttcaccaatgtagagcatcggtgcttcgtcgatttcaccttcaccaatgacgatggtgccgtcaatgttgacctggttgagcataatacgcatggcgtttaccgccgcgccgtccgcggtgtttttatcgccgcgtcctaaccatttgtagccagccagcgccgctgattcggtgacgcgggaaaattcgatggcaagttctcgtctcatagcaaactctaagcagtaaggaatggcgcgaagtgtagcacaggggaagggagggattattgatgtgtgcggggttgcccccgcacgtttcgggactaccggatgcggcataaacgcttcattcggcatttacattattcgtcgtgttcttcccacgccatcgcgcgtttaaccgcttttttccagcctgcgtaacggtaattacgctcagtggtttcgatgcctggacggaactcgcgctcaatcaccgctttctcttgcagctcgtcgaggttctgccagaagccaaccgccaggcctgcgagataggccgcacccaatgcggtgacttcgcgcacttccgggcgctcaacgcgggtgccgagaatatcggactggaactgcatcaggaaattgtttgctactgcgccaccatccacgcgcagggcgtgcagacggataccagagtcggcctgcatcgcttccagcacgtcacgcgtctgataagcaatagactccagcgtcgcgcgtataatgtggttagcgttcaccccacgagtcagaccgaaaatcgccccgcgcgcatacgggtcccagtacggcgcacccagcccggtaaatgccggaaccacatacacaccattggtgttttgcactttggtggcgaaatattcggaatcgtaggcgtcgttaatcaacttcatttcatcgcgcagccactgaatggatgcgcctgccataaacaccgcaccttccaacgcatagttcacttcgccagtcgggccgcaggcgatggtggtcagcaggccgttttctgatttcaccgctttctcgccagtgttcatcagcataaagcagccagtgccataggtgttcttcgccatcccttctttcacgcacaactgaccaaacagcgcggcctgctggtcaccggcgatcccggagattggaatacgcgtgccgcctttgccgccaatgttagtctgaccgtatacttcggaagaacgacgcacttctggcagcatctcgcgcggaatatccagcacttccagcattttgtcgtcccagtccagggtatggatgttgaacaacatggtacgagaggcgttggtgtaatcggtcacatggacacggccctgagtcattttccagataagccacgtatcaaccgtaccaaacagcaattcaccacgacgtgcacgctcgcgagagccttccacatggtcgaggatccacttcactttggtgccagaaaagtacgggtcaatcaccagaccggtattgctgcggatataatcttctaaaccgtcacgttttaaatgctcgcagatttctgcggtacgacggcactgccagacaatggcgttatagataggcttgccggtttctttttcccagacaatagtggtttcacgctggttcgtaataccgatagctgcaatttgatcggaactgatatcggctttcgccagcacttctaccagcgtggagctttgggtggcccagatttccattgggtcgtgttctacccaacctggttttgggtagatttgctcaaattcgcgctgcgacacgctaatgatattggcatcgtgatccattacgaccgcgcgggagctggtggtgccctggtcgagcgcaacgatatattttttttcagtcatgtttaattgtcccgtagtcatattacagcgaagctttttgttctgaaggagttgtggtttccttttcttccacaacacagatatcgcaaggcaaatggcgaccaatcagtttgcggtaggcaaatgcacctacaatcgcgccaacgatagggccgaaaagcggcaccaggaagtaaggaatgtctctgccgccggtaaaggcgacattgccccagcccgccagccaggcaaagactttcggaccgaagtcacgcgctgggttcatggcaaaacctgtcaatgggcccatagatgcgccaatgaccgcaatcagtagaccaatcagcaagggagccaaagggccgcgtggtacaccgttgccatcgtccgttaacgccaggatcagccccatcagaatagcggtaatcaccatctcaactgcgaaagcctgcacaaaattgatatgaggattagggtaagtagagaaagtgccagccagatcaacactttcaacgctgccgcgaacaatgtgatgagtctgctcgaagtcgaaaaataaattgtagtaaagcccgtaaactaaagccgcagcacagaaagcgccggcaacttgtgaaacgataaaaggaataactttgcgcttgtcgaaacaggcaaacagccacaatgcaatggtaacagcgggattaagatgcgcgccggaaacccctgcggtcaggtagatggccattgccacccccagtccccaaatgacactgatttcccactgaccaaaagacgcaccagcgacttttagtgctgcaacgcaacccacaccgaagaaaatcaacaacccggtaccgaggaattcagcaatgcactggcctttcaaggttgatgtttgactcataatcggatcctgaagagttaatgtttgttgtatgcgtgaaagtcacggacctccacgatgcttgtaggcatgctgtaaacttatcgttaacgagcaaaaacgagaaatatcgaacttaaaatgtgtgtgcctcgtcataaaatgagcgttatcgcgccatttattccatctgattgtacatgatgcatgtttgttagatcattcgcgcaacaaatttattaacattttcgattgatgtggattatgtcaccaggagaaggatgaaaagtgtggcaaaccgtaatctgcaaggcgtgccgctggacagcgatggcgcggcttcatacaatcggagctaactaaagtgcgctcgtatttattaaggcgtcaccggtaatcgggacgaggatttttatccatcaacgccttgcaattcaggagaggtatgacaatgtcattagaagtgtttgagaaactggaagcaaaagtacagcaggcgattgataccatcactctgttgcagatggaaatcgaagagctgaaagaaaaaaacaactcactgtcgcaggaagttcaaaatgcccagcatcagcgcgaagagctggagcgtgagaacaaccatctgaaagaacagcagaacggctggcaggaacgtctgcaggccctgctgggtcgcatggaagaggtctgattacgcttcatcttccgcgtaatttctttactgtgtaggccaacaggtaacgcagaaaaaaggcaccttgcggtgcctttcttatcattcaatatccagcggatcttctgaaagaataatcccggtattgtcggcataaagatggtcgccggagaagaaggtgacaccgccaaaattgacgcggacatcgctttcgccaatgccttcgccagcggcaccaaccggaattgccgccatcgcctggatgccgatatccaactcttccaggtcatctacctgacgcaccgcgccgtaaatgaccagaccttcccattcattttgtactgccagacgcgccagttcagcatcgaccagtgcgcgacgaacagaaccaccgccatcgacgacaagaacacgaccacggccattctgttcgagcagatcgtacagcaacccgttgtcctcgaaacattttaccgtgattatttgtccgccaaacgacgcccgtccgccaaagttggagaacagcggttccacgacgttaacatcttcttgatagatgtcacaaagctcggaagtatcgtatttcataggcttaacattcagttgctgcgagaattttcagtatatcgcgctatgtgggctgttggcaaaatcatcaattgttaattgatatttgtcagttatgctgcccactggcttaggaatatccctaaaacaaacagcaggttagtcagtaacgctcccttgacagtacgttccagcattggtcgcatcgccaccgggtccatttcccgcatcacataacgggcttgcttcaccagtaatggtgccgccagcaggaacagccagccccacaggctatgcagcgaaaagagattaaacagcgccagacacaccagcgagcccatcagcaggcaggcatgataacgacgcgcgttcacttcacctaagcgcaccaccagcgtgtttttgccattttcgcggtcgctattgatatcacgcaggttattaatattcagtactgccgttgccagcaggccgcatgcggtcgccggaaggatcagtgccggaatcaatgtatgagcctgtaaataccagctccccatgacactcaaccagccaaagaaaaccagtacggaaatatcacccagaccgatataaccataaggacgattgcccacggtgtaggtgatagcggcaatgatcgacaacccgccaagaatcaggaaaccgacaaaatcggccagcgtatggcatgccactgcaaccagtgccagcccggagagacagatgagcacgacggtaataatgagcgcccgtttcatctcttgctgggtaatgacccctttttgcatgccgcgtagcggcccaatgcggtcaggtttatcgctgccttttaccgcatcgccgtaatcattggcgaggttagaaaggatctgtaatagcccggcggtaattagtgccagcagggcgaccagcggatcgaagtgaccttgccaccatgccagcgctgtcccgacgataattgcagcaaaggcgagggggagggttttaggtcgtaaactttccagccacgcctgagttcggctaatttgttgttcagtcataatacgcgccaataaaaatggggcctttcagccccatcaaacaatgatgaaaatgattgaacgcgattataggataaaacggctcagatcttcatctgccaccaacgcatccagatgtttgctcacataatctgcgtcaatagtgatattttgaccgcttaaatcgctggcgtcgtaggaaatctcttccattaaacgctccagaacagtgtgtaaacgacgagcaccgatgttttcggtagattcgttcacctgccatgccgcttccgcgatgcgtttaataccggagtcggtaaactcgatatttacgccttcagtcgccatcagtgctttgtactgcacggtgatagaggcattcggctcggtcagaatacgctcgaagtcgctggtggtcagcgcctgcagttcaacgcggattggcagacgaccttgcagttccgggatcaggtcagacggtttcgcaatctggaacgcgccagaagcgataaacagaatgtggtcagttttgaccatcccgtgtttggtggaaacggtgcaaccttctaccagcggcagcaggtcacgctgaacgccttcacgagaaacatccggaccggaagactcgccgcgcttacagattttgtcgatttcgtcgataaacacgatcccgtgctgctcaacagcgtcgatagcgtcttgcttcagctcttccgggttcaccagtttcgccgcttcttcttcaatcagcagcttcatggcgtctttgattttcagcttacgcgctttttgcttctggccgcccaggttctggaacatggactgcagctggctggtcatctcttccatgcccggaggagccataatttcaacgcccatcggtgctgcggcaagatcgatctcgatttctttgtcatcaagctggccttcacgcagttttttgcggaatgcctgacgagcagcggacggttcctgctgctgttcggtctgtccccagttgtttttagcaggtgggatcagcacgtcgagaatacgttcttctgccagttcttcagcgcgataacggtttttctcgatagcctggacgcgtaccattttcacggcggcatcggtcagatcgcgaataatagaatccacttccttaccgacgtagcccacttcggtgaatttggtcgcttcaactttgatgaacggcgcattcgccagcttagccagacgacgggcgatttcagttttaccgacaccggtcgggccgatcatcaggatatttttcggggtcacttcatggcgcagctcttcgttgagctgcatgcgacgccagcggttacgcagagcaatcgccacagaacgcttggcgttgtcctggccgatgatgtgcttatccagttcgctgacgatttcgcgtggggtcatttcagacatgggagatccttacgctttgtagcttaattcttcgatggtgtggaaatggttggtatagatgcaaatgtcgcctgcaatatccaacgccttttcagcaatttcacgggcgctaagttcagtgttttctaacagcgcgcgcgccgcagcctgggcgtaagggccgccggagccgatagcaataagatcgttttctggctgcaccacgtcaccgttaccggtgatgataagcgatgcagtttcatccgcgactgccagcagtgcttcaagtttgcgcagcatgcgatcggtacgccagtcttttgccagctcaacggcggctttgaccagatggccctgatgcatttccagtttacgttcaaacagttcgaacagcgtaaaagcatccgcagtaccgcccgcaaagcccgcgatgactttgtcgttgtacagacggcggacctttttcacgttgcctttcattacggtattgcccaacgtggcctgaccatcaccagcgatgaccacatggccgttacggcgtacgcttactatagttgtcacgagctgaccccttggttacgaatacagagtacaaaccccgtacaaaagtacggggcataatgcaattatagatgggggggattttgagggtttcaacccccggcggcgagccgaatgcagtttgtatgacccgccatcttcaaccgattgagggtgctgtctgcgttctctttgcctttcaccgggccaatgaccacacgattccagccattgttggtggtgattttcgagtcaaagccttcgaacgccagctgagcacgtaccgtctctgcctgttccgcgcctctgaacgaaccgcactgcaccatccagcggcgttcgtcttttttctccgccgtcggttttggcgcgtcagcggcacgagcaactggcgcagcttgctgcggcttcgactgcgcagtcgtgtgcgcaggagtttgcagcagatcctggtacggctgctgagaagaagccggtttagactggcgcggttgcgcctgtaccggtgcggcttgcgacgtacgcgtctgctgctgccagctttgttcagtcgtacgcgactgctgagccaggcgttgctgttccgctaattgctgcgcctgacgttggcgctgtagcgtttgctgacgctgttccggcgtctgttcattccacggaacttcaaccagctgcgttggctgctggcgcatatcagcctgcatttgttcaagaagctgacgttgttctggtgtcagttgctccggcgttttcacttcaccaccggcagaaggttctgtgggcgcacgcactcccggctggcgactttccagctctttaatgtagcgccagcgttcttctggttttggtggtagtccgtttccggtcactttctggctttgcagcgtctcggactcttctttcttgtgatgcgtaatgaagtacagaccaccgataaaggtcacaagaacggcggcagcaatagcgaccatagcgggagaaaccgcaggcagatttcgttgctttttccgtgaggtgctcttttttcgccgcgaaggtgccggttggctgcggcgtacataatctcgttgtgccactatcgtttcgctgtatttattcgttcgtcagcccgccatgttacttaagcggcgggcctttgaccagtcacggcagtcttaaaggtttactttaaggtaacgcgcgtgttgatccccggatgataagttcgcagtccattaaacgagagccactgccaacgtgttgcccctgcatttgatcaagcaataacagcatagcttcccgaccgatttcgtaacgcggctgcgcgatggttgtcagcggcggatcacaaaattgcgtcaggtcgatgttatcaaaaccgattatggaaaggtcttccgggactttcagcccctggcgttttgcctgagaaagtgcgccgagcgccatcacatcgctatggcagaagacagcagtaggcggttgtggaagatcaagcagctgctgcatcgctttgcttccggcttcgaaggtgaagtcgccacgggcgatgtattgcggatcaaccataatgccgcagcgacgcagcgcctgaacatagccttgcaggcggtagtgacacagcggcatctcttcgggaccggctatacagccaatccgtttatgcccttgctcatataaataatttactgcatcaaatgcggcggtcagattgtcgatatgaactgtaggcagctccagctccggtgcaaattcgttcgccatcaccatcggcggcagattacgctgttcctcaatgctggcatcaaacggcagccttgaacccagcaacaacatgccatcaatttgcttggtgatgatcaaatcgataaaggttttttcctgctgattttgatgcgcacagtcgccaatcagcaccagatatccgtgatttgccgccgtaacttcgataccgcgaataatttcgctaaagaagggatcgcagatatccgggacaatcaccagaatggtgcgggattcattacgcttgacgttgcgccccataggctgcggtaaataacccacttcccgggccgctttttcaacccgattacgggtggcctgggagactttatcgggattcattaatgctcgggagacggtcgctgtagagacttttgccttgagggcaacgtctttcatggtcgcggcagtttcctgcttcttcgctttcacactcactcctcgcctggcacgtcaggcgtactacatccatgtttacttcacatcggcaacatttttagcagatagcgcgtgaaaacggttacagaattttcatgaaaagtgtgatgaatattgaatttttcgatccgcctcgcatcgtgagcggtttaaccctcaatcggatcaacatccagcacccatttcaccttacgggaatccggtattgtattgatgagcgccagcgtaccgttaatgatgtgttgcaagcgcacgcgggaagggtgctgcaacaatatctgccagcgccagcgaccgccacgtttaggtgccagagccggaaccggaccgagaacccacagtttctcgtctgccagtgggctggagaggatcagattacgcagttgttgcaggaacaatggcgcgtgctgattgttatgatcttccgcacgcacaatcacatggctggtccacggcggtagctgcatcattcgccgctcagccagcgcctgttcggcaaaggcgtcgtagcctttatagagcaacgtttgcaacagaggatgttccggatggtgcgtttgcagcaccacttcgccctgtttacccgcacgcccggcacgaccggcgacctgggtgtaaagctgagcgaaacgctctgccgagcgaaaatcggcagaaaacagcgcgccgtccacgtccagtaatgcaaccagcgtcacatccgggaaatggtgacctttcgccagcatttgtgtaccaatcaaaatccgcgcgccgccgcgatgtacttctgccagttgctgttccagcgcccctttgcggctggtggtatcgcggtcgatacgagaaatgggcacgccggggaacaacggcgcgagcgtctgttcaagctgttcggtgcccagccccacggggaccaggtgcgtggaaccgcaggaagggcactggcgcggcaccggacgctgactgtcacagtggtggcagcgcagatggtgctgcgcctgatgcagcgtgtagtagtgatcgcaacgtgggcattcggcaatccagccacagtcgtggcacagcagtgcaggcgcaaagccacggcggttaagaaagagaatgacctggttatcagcctgtaaatgctggcgcatacgagtgattaacgccggagccagacctgcctgcaccttctgaccttttaaatccagcacatgttgaattgccggacgcgcattccctgcccgacgggtcaggcgcagcaggcggtattttttctgctggacgttgcataacgtttccagcgcgggcgttgcggagccaagaataatcgggatttgctcgctgtgcgcacgatacaccgccaggtcgcgggcatgatagcgccagccttcctgctgcttgtaggagctgtcgtgctcttcatcaatgacaatcacgccgagatttttaaacggcgtaaacagcgcggagcgggtgccgatcacaatcgccgcctcaccatttttcgctttcagccacgccgaaagacgctcgctgtcgttcaggccggaatgcagaacttccacgggggcattaaaacgttcacgaaaacgggcgatagtttgcggtgtcaggccgatttccggcaccatcaccagcgcctgtttgccctgagcgagcacgttttccagtacgctgagataaacctccgttttaccggaaccggtaacgcccgccagcagccaggcagaaaaagtatctgccgcgctatgaattgcgccaacggcggtggcctgttcggtattcaatcgcaaccgctcaccagaaacggcatagttcgttcgccagtcgctaaactctggtgtttcacttgctaaatcacacagaccttttttgcgtagcgcctgcaacgcggcatcattaaattcgagcgtggcgacctggtcgcgccagattttgccttgccgtaacgccgccagcgcctgttgttgcttgggggagcgtttcaggctgttcagatccaccgcctggccttgttcagtggcaaaccagtaccacatcggcgcgttcgccgcaggccgcccctggcgtagtaaaatcggcaaggcatgaaacagcacatcgccaatcggatgatgatagtaatctgccgcccatagcagcaatcgccagacggagtgagtaaacaccggctcactatccagcacttcgactaccgcttttagctcattgagcggcagttcgctggcatcgctaactgataccacaatcccgatgcgctcctgctgtttgccaaacggcacgcgcacgcgacacccagctttaaccgtcatgccttctggcagcagatagtcaaaggtacgaggaagcggaacgggcaaggcaacgtgggcaacgggcatagcatcatcctgacttgaaattcggtgggttagtatacacattgccgtagaagagtgcggatcagtttgcatacgctggttaatttctgtatgatttcgcgccttcgtacgaaatgatcgtattgaagctatacttttaacatcgcgtggtgtctggcgttagggctggaagagcgacgcggccttaaaccgaggttttcccatgaaaaaagatattcacccgaaatacgaagaaattactgctagctgctcttgcggtaacgtaatgaaaatccgctccaccgttggtcatgacctgaacctcgacgtgtgcagcaagtgccacccgttcttcactggcaaacagcgtgatgttgctaccggtggccgtgttgaccgcttcaacaagcgtttcaacatcccgggcagcaaataagaccggatttccgaaaaaagcgccgcacggcgctttttttgtgcctgaattttggtcgtattaccacgaaaacagcggccattctttggcgaccgtggtgagttgtggcgcatcgaaaacggcttgtggcgagaccaccgtttcctcaagcggaatattcttgccgtaacgttctttgagctttgcctgaacttgtgggctgctcaggtcgaactctttcaacttctgctgctcgcccacgcgcattcccagcgcgttctggtaaaccttccacaccacttccgaacagtactggcgatcgtcgctccatgagaagctgaaatcatacggtttaccgagataacgttttgccgtttgcgccagtttttgctgttgttcaacactcagtccgccttcaacgcggcgaacaacgtatttgcccttttcaccatgggcgatccactgcttgagcggggtgtatttcaccgggccgactgcttcaaaaacgtagggctttttgttgcgtatcaccagcataccggtgtggctataatcggtatgggtcgccagttggatcgctttactttgcgatgagcgagagatctgaaagatgatgtcgccggtttgtggctgccaggcaaaggcaggtacagaaaccagcaggctgaggatcagcagcctgtttttcatagttaaacgtccatgtataaaaagcggtgggtcgcagacaacgtgctcgttgtttatgccggatgcggcgtgaacgccttatccggcctacaagttcgtgcaaattcaataaattgcaatatgacgtaggcctgataagcgtagcgcatcaggcgattccactccgcgccgctcttttttgctttagtattcccacgtctccgggttaatccccatctcacgcatgatctcttttgccgcttccgggatttcgtcgctgcgctctttacgcagatcggcatcatccggcaaaggttgcccggtaaaggcatgcagaaacgcttcgcacagcagctcgctgttggtagcgtgacgcaggttgttcacctgacgacgcgtgcgttcatcggtgaggatttttaacaccttaagaggaatggaaaccgtaatctttttgacttgttcactcttcttgccgtgctcagcgtatgggctgatatattcgccgctccattcagccatgagatacttaatcctcttcgtcaataaattgagaccagaccacacagttgatgtgggtactgaccgtaaacccgcatagtttaccgtacaggcgttaccgtgacatcgtgtaatgcacctgtcggcgtgataatgcatataattttaacggctatttgggatttgctcaatctatacgcaaagaagtttagatgtccagatgtattgacgtccattaacacaatgtttactctggtgcctgacatttcaccgacaaagcccagggaacttcatcacatgacgcgtaaacaggccaccatcgcagtgcgtagcgggttaaatgacgacgaacagtatggttgcgttgtcccaccgatccatctttccagcacctataactttaccggatttaatgaaccgcgcgcgcatgattactcgcgtcgcggcaacccaacgcgcgatgtggttcagcgtgcgctggcagaactggaaggtggtgctggtgcagtacttactaataccggcatgtccgcgattcacctggtaacgaccgtctttttgaaacctggcgatctgctggttgcgccgcacgactgctacggcggtagctatcgcctgttcgacagtctggcgaaacgcggttgctatcgcgtgttgtttgttgatcaaggcgatgaacaggcattacgggcagcgctggcagaaaaacccaaactggtactggtagaaagcccaagtaatccattgttacgcgtcgtggatattgcgaaaatctgccatctggcaagggaagtcggggcggtgagcgtggtggataacaccttcttaagcccggcattacaaaatccgctggcattaggtgccgatctggtgttgcattcatgcacgaaatatctgaacggtcactcagacgtagtggccggcgtggtgattgctaaagacccggacgttgtcactgaactggcctggtgggcaaacaatattggcgtgacgggcggcgcgtttgacagctatctgctgctacgtgggttgcgaacgctggtgccgcgtatggagctggcgcagcgcaacgcgcaggcgattgtgaaatacctgcaaacccagccgttggtgaaaaaactgtatcacccgtcgttgccggaaaatcaggggcatgaaattgccgcgcgccagcaaaaaggctttggcgcaatgttgagttttgaactggatggcgatgagcagacgctgcgtcgtttcctgggcgggctgtcgttgtttacgctggcggaatcattagggggagtggaaagtttaatctctcacgccgcaaccatgacacatgcaggcatggcaccagaagcgcgtgctgccgccgggatctccgagacgctgctgcgtatctccaccggtattgaagatggcgaagatttaattgccgacctggaaaatggcttccgggctgcaaacaaggggtaaaaatgagtgtgattgcgcaggcaggggcgaaaggtcgtcagctgcataaatttggtggcagtagtctggctgatgtgaagtgttatttgcgtgtcgcgggcattatggcggagtactctcagcctgacgatatgatggtggtttccgccgccggtagcaccactaaccagttgattaactggttgaaactaagccagaccgatcgtctctctgcgcatcaggttcaacaaacgctgcgtcgctatcagtgcgatctgattagcggtctgctacccgctgaagaagccgatagcctcattagcgcttttgtcagcgaccttgagcgcctggcggcgctgctcgacagcggtattaacgacgcagtgtatgcggaagtggtgggccacggggaagtatggtcggcacgtctgatgtctgcggtacttaatcaacaagggctgccagcggcctggcttgatgcccgcgagtttttacgcgctgaacgcgccgcacaaccgcaggttgatgaagggctttcttacccgttgctgcaacagctgctggtgcaacatccgggcaaacgtctggtggtgaccggatttatcagccgcaacaacgccggtgaaacggtgctgctggggcgtaacggttccgactattccgcgacacaaatcggtgcgctggcgggtgtttctcgcgtaaccatctggagcgacgtcgccggggtatacagtgccgacccgcgtaaagtgaaagatgcctgcctgctgccgttgctgcgtctggatgaggccagcgaactggcgcgcctggcggctcccgttcttcacgcccgtactttacagccggtttctggcagcgaaatcgacctgcaactgcgctgtagctacacgccggatcaaggttccacgcgcattgaacgcgtgctggcctccggtactggtgcgcgtattgtcaccagccacgatgatgtctgtttgattgagtttcaggtgcccgccagtcaggatttcaaactggcgcataaagagatcgaccaaatcctgaaacgcgcgcaggtacgcccgctggcggttggcgtacataacgatcgccagttgctgcaattttgctacacctcagaagtggccgacagtgcgctgaaaatcctcgacgaagcgggattacctggcgaactgcgcctgcgtcaggggctggcgctggtggcgatggtcggtgcaggcgtcacccgtaacccgctgcattgccaccgcttctggcagcaactgaaaggccagccggtcgaatttacctggcagtccgatgacggcatcagcctggtggcagtactgcgcaccggcccgaccgaaagcctgattcaggggctgcatcagtccgtcttccgcgcagaaaaacgcatcggcctggtattgttcggtaagggcaatatcggttcccgttggctggaactgttcgcccgtgagcagagcacgctttcggcacgtaccggctttgagtttgtgctggcaggtgtggtggacagccgccgcagcctgttgagctatgacgggctggacgccagccgcgcgttagccttcttcaacgatgaagcggttgagcaggatgaagagtcgttgttcctgtggatgcgcgcccatccgtatgatgatttagtggtgctggacgttaccgccagccagcagcttgctgatcagtatcttgatttcgccagccacggtttccacgttatcagcgccaacaaactggcgggagccagcgacagcaataaatatcgccagatccacgacgccttcgaaaaaaccgggcgtcactggctgtacaatgccaccgtcggtgcgggcttgccgatcaaccacaccgtgcgcgatctgatcgacagcggcgatactattttgtcgatcagcgggatcttctccggcacgctctcctggctgttcctgcaattcgacggtagcgtgccgtttaccgagctggtggatcaggcgtggcagcagggcttaaccgaacctgacccgcgtgacgatctctctggcaaagacgtgatgcgcaagctggtgattctggcgcgtgaagcaggttacaacatcgaaccggatcaggtacgtgtggaatcgctggtgcctgctcattgcgaaggcggcagcatcgaccatttctttgaaaatggcgatgaactgaacgagcagatggtgcaacggctggaagcggcccgcgaaatggggctggtgctgcgctacgtggcgcgtttcgatgccaacggtaaagcgcgtgtaggcgtggaagcggtgcgtgaagatcatccgttggcatcactgctgccgtgcgataacgtctttgccatcgaaagccgctggtatcgcgataaccctctggtgatccgcggacctggcgctgggcgcgacgtcaccgccggggcgattcagtcggatatcaaccggctggcacagttgttgtaatttcagaaatttaataatgcccggtactcatgttttcgggtttatggtttctaatgaaatatattgaattatcataggattaggccggattaagcgtttacgacgaatccggcaagaagcaataagtacatggttagtttatatttgcagtccggtttgctttgcataccggattttctttttcttaccatcctgaagttttttcatcttccctgatttttcctcaccatcattggtcatttttcggttgacgcccttcggcttttccttcatctttacatctggacgtctaaatggatagatgtgcacaacacaacatataactacaagcgattgatgaggtaaggtatgagcttttttcacgccagccagcgggatgccctgaatcagagcctggcagaagtccaggggcagattaacgtttcgttcgagtttttcccgccgcgtaccagtgaaatggagcagaccctgtggaactccatcgatcgccttagcagcctgaaaccgaagtttgtatcggtgacctatggcgcgaactccggcgagcgcgaccgtacgcacagcattattaaaggcattaaagatcgcactggtctggaagcggcaccgcatcttacttgcattgatgcgacgcccgacgagctgcgcaccattgcacgcgactactggaataacggtattcgtcatatcgtggcgctgcgtggcgatctgccgccgggaagtggtaagccagaaatgtatgcttctgacctggtgacgctgttaaaagaagtggcagatttcgatatctccgtggcggcgtatccggaagttcacccggaagcaaaaagcgctcaggcggatttgcttaatctgaaacgcaaagtggatgccggagccaaccgcgcgattactcagttcttcttcgatgtcgaaagctacctgcgttttcgtgaccgctgtgtatcggcgggcattgatgtggaaattattccgggaattttgccggtatctaactttaaacaggcgaagaaatttgccgatatgaccaacgtgcgtattccggcgtggatggcgcaaatgttcgacggtctggatgatgatgccgaaacccgcaaactggttggcgcgaatattgccatggatatggtgaagattttaagccgtgaaggagtgaaagatttccacttctatacgcttaaccgtgctgaaatgagttacgcgatttgccatacgctgggggttcgacctggtttataaatagtgtggcttttgtgaaaatcacacagtgatcacaaattttaaacagagcacaaaatgctgcctcgaaatgagggcgggaaaataaggttatcagccttgttttctccctcattacttgaaggatatgaagctaaaacccttttttataaagcatttgtccgaattcggacataatcaaaaaagcttaattaagatcaatttgatctacatctctttaaccaacaatatgtaagatctcaactatcgcatccgtggattaattcaattataacttctctctaacgctgtgtatcgtaacggtaacactgtagaggggagcacattgatgagcacgtcagacgatatccataacaccacagccactggcaaatgcccgttccatcagggcggtcacgaccagagtgcgggggcgggcacaaccactcgcgactggtggccaaatcaacttcgtgttgacctgttaaaccaacattctaatcgttctaacccactgggtgaggactttgactaccgcaaagaattcagcaaattagattactacggcctgaaaaaagatctgaaagccctgttgacagaatctcaaccgtggtggccagccgactggggcagttacgccggtctgtttattcgtatggcctggcacggcgcggggacttaccgttcaatcgatggacgcggtggcgcgggtcgtggtcagcaacgttttgcaccgctgaactcctggccggataacgtaagcctcgataaagcgcgtcgcctgttgtggccaatcaaacagaaatatggtcagaaaatctcctgggccgacctgtttatcctcgcgggtaacgtggcgctagaaaactccggcttccgtaccttcggttttggtgccggtcgtgaagacgtctgggaaccggatctggatgttaactggggtgatgaaaaagcctggctgactcaccgtcatccggaagcgctggcgaaagcaccgctgggtgcaaccgagatgggtctgatttacgttaacccggaaggcccggatcacagcggcgaaccgctttctgcggcagcagctatccgcgcgaccttcggcaacatgggcatgaacgacgaagaaaccgtggcgctgattgcgggtggtcatacgctgggtaaaacccacggtgccggtccgacatcaaatgtaggtcctgatccagaagctgcaccgattgaagaacaaggtttaggttgggcgagcacttacggcagcggcgttggcgcagatgccattacctctggtctggaagtagtctggacccagacgccgacccagtggagcaactatttcttcgagaacctgttcaagtatgagtgggtacagacccgcagcccggctggcgcaatccagttcgaagcggtagacgcaccggaaattatcccggatccgtttgatccgtcgaagaaacgtaaaccgacaatgctggtgaccgacctgacgctgcgttttgatcctgagttcgagaagatctctcgtcgtttcctcaacgatccgcaggcgttcaacgaagcctttgcccgtgcctggttcaaactgacgcacagggatatggggccgaaatctcgctacatcgggccggaagtgccgaaagaagatctgatctggcaagatccgctgccgcagccgatctacaacccgaccgagcaggacattatcgatctgaaattcgcgattgcggattctggtctgtctgttagtgagctggtatcggtggcctgggcatctgcttctaccttccgtggtggcgacaaacgcggtggtgccaacggtgcgcgtctggcattaatgccgcagcgcgactgggatgtgaacgccgcagccgttcgtgctctgcctgttctggagaaaatccagaaagagtctggtaaagcctcgctggcggatatcatagtgctggctggtgtggttggtgttgagaaagccgcaagcgccgcaggtttgagcattcatgtaccgtttgcgccgggtcgcgttgatgcgcgtcaggatcagactgacattgagatgtttgagctgctggagccaattgctgacggtttccgtaactatcgcgctcgtctggacgtttccaccaccgagtcactgctgatcgacaaagcacagcaactgacgctgaccgcgccggaaatgactgcgctggtgggcggcatgcgtgtactgggtgccaacttcgatggcagcaaaaacggcgtcttcactgaccgcgttggcgtattgagcaatgacttcttcgtgaacttgctggatatgcgttacgagtggaaagcgaccgacgaatcgaaagagctgttcgaaggccgtgaccgtgaaaccggcgaagtgaaatttacggccagccgtgcggatctggtgtttggttctaactccgtcctgcgtgcggtggcggaagtttacgccagtagcgatgcccacgagaagtttgttaaagacttcgtggcggcatgggtgaaagtgatgaacctcgaccgtttcgacctgctgtaatctgaccccgttcagcggctgcttgctggcagtcgctgaacgttctttaccagcgtatagtgggcgaacgaaaactacacactggatctctcatgtctgccgcaggaaagagcaacccactggcaatcagtggcctggttgtgctcacacttatctggagttatagctggattttcatgaagcaagtcaccagttacatcggtgccttcgactttaccgccttacgctgcattttcggcgctctcgttttattcatcgtccttttattacgtggtcgcggaatgcgcccgacaccgtttaaatacaccttagccattgccctgttacaaacctgcgggatggttggtctggcgcagtgggcgttggtcagcggaggtgcggggaaggtggcgatcctgagctataccatgccgttctgggtggtgattttcgccgcgttgtttctcggtgaacgcctgcgacgtgggcaatatttcgcgattctgattgccgctttcggcttatttttggtgttgcagccgtggcaactcgatttctcttcgatgaaaagtgccatgctggcaatcctctccggcgtcagttggggggcgagcgcgattgttgctaaacgtctgtatgcccgtcatccgcgcgtggatttattgtcgttaacatcctggcagatgctgtatgcggcgctggtgatgagtgtggtcgctttactggtgccgcaacgtgaaattgactggcagcccaccgtgttctgggcgctggcctacagtgcgattctggcgacggcactggcgtggagcttatggttgtttgtattgaaaaacttgcctgccagtattgccagcttaagcacactggccgttcccgtttgcggcgtactcttttcctggtggctgctcggcgagaatccgggggccgttgaaggtagcggtattgtgctgattgtgctggcactggcgctggtgagccgtaagaaaaaagaagccgtcagtgtaaaaaggatctgaattttttcttcatgtggggcgatctcttatttaacaaaataacgataatgccccaccatccgccagttaaacagcacatcttcttcctgcgcgcctgcgccaatgttatgtatcaccagcggcgtaccgtcgcgggcgaagccatctgaaaccaccccaatatgtgccagcccgttatccagtcgccaggagacaatatcgcccgcttgatagtcactggggttcttgctggtggggcgtgttttatcatggcggctaaaccaggtttccagattaggcacccgacggtgatcgatgttgctgtccgggcgctttaacttccatttttgcgggtactcagcaaaattcttcgccatatcttcgtgaaccagtttctgcaaatcgaccttctggctgcgcaatgcgcggatcaccacatcggaacatacaccgcgttcttgcggaacatcaccgccaggataagtaagctgcacatacgccggatcgtaaaatagcgtgctgccaatttgctgtctggcaccgtctgcgatggcaaggttggtattggcctggatttgtaccacggttggtggaacggcgggagattttaaggagtggctggtaaatgccgttagcaggctgagcagcgccagtgaagctttcatctggttcgtccgtgaaaataagagtcacagattcgaccttccgggctaacgattgttctgtagagaaaatgtccagaagcggataaaaaattcctgaacaacgtgggagtttcagattactggcacagagtgccggatgcggagtgaacgccttatccggcctacaaaagcacgcaaattcaatatattgcagagattgcgtaggcctgataagcgtagcgcatcaggcaattttgcgttcaaactcccggacaagccgggagtttggagtaggttattcccactcttgcaggaaacgctgaccgtactggtcggctaccagcagagcggcgtaaacctgatctggcgtcgcgccgccaggcatgttgtgaatggtttcaccttctgcacatgccgcttctgccacaattcgcattttcgccgggacatcttctttaatatccagttgagcgagagttattggcaaacctaccgcatggctaagggcagctacggtttcgatttcctccaccggcgcattttccagaaccagctgcgtcagcgtaccgaatgccactttttcaccgtgataatagtgatgcgcgtccgggatagcggtcaggccgttatgcactgcgtgcgccgcagccagaccaccactttcaaaaccaacaccgctcaaataggtgttcgcttcaatcacgcgctccagcgccggagtcactacatgctgttcggcagcaagcatcgctttttcgccttcttccagcagggtgttgtagcacagttcagccagtgccagcgcagcctgggtgcacttgccgcccgccatggtggtcgcgccgctacgagagcaggcacgcgcttcaaaccaggttgccagcgcatcgccgatacccgccgctaacagacgtgcaggtgcgccagcgacgattttggtgtcgacaatgaccatattcgggttatttggcaacagcagatagcggtcaaactcaccctcatcggtgtagataacagacaatgcgctgcacggtgcatcggtagaggcgatagtcggtgcgatcgctaccggaacacccatgaaatgtgccagtgctttggcagtatcgagggtttttccgccaccgataccgagaattgcgccacactgcgcagtctccgcgatgccacgcagacggtcgatctcattttgcgaacattcaccgccaaacggcgcaatttctactaccagtccagcatctttaaagcttttctcgacagtggattgagcaaaacctaaaacaaatttgtcacccaccactaaccagcgttctgccagcggcttcaggtattcgcccagacgattaatcacatcagcgccctggatgtatttacccggtgattgaataatgcggtccataattgctcctttagagatgagtagtgccaaatgcggcattccagtcgtgttcgaacttctctatagctgactctaccgcaggggtgttgagcatttgttgcgctacatctaagggcagggtgatggattcacatcctgccagtaaacagtccagcgcctgacgcggcgttttaaagctggctgccagcaccatgctttctggcgcgtgcatttctaacagcgtttgcagctcctgaaccgtacgaatgccgtctccgccctgggcatctacgcggttaacatacggagcaacgtattttgcccctgccagtgcggctaataacccttgtgcggcgctatatacagcagtgccaagtgtagtaataccctcttttttcagtattttaattgctgccagaccttcggaagtcaccgggattttcaccacaatacccggaatagcgtcgcgcaggcgcttcgcttcttccaccatcccctgcgcgtcgcggctcatggtctgagcaaacagaatgccctcatcaccaatcgctttttgcagacgcggcagcacttcccatatggactccttgctggcagcgataatgctcgggttagttgtcaccccggcaatggggaatatgcgtgccagacgttcgacttctgcgacgttagcggtgtccagatacagttccatgatgtttccttttacagttccagttcatgttgcagcaggctggcgatagcgtcggcagaggcggcgttaaccagcgcgttacggaattcttcgtgcatgatgcggcgagcgaggcgcgagaaaatgcgcatatgctgatcgcccgcagcgtgtttgttcagggttaacataatgatgaattgcgcttcatcatcgccccagcgcaccggcgcttgcagacgcgccacgctgatggtggattgctcaatgtgttctgatttgctgtgtggaatggcaaaactaaagcccagaccggtagagaaaacggcctcgcgcgcccacaagtcggcttccagtttacgcggatagcggcagcggcccgccagcagcaggttatcggtcatgcctttgagcacttcttctttgctgcgccagtcgctttccagtgtgatgcactcggcggtgaccagcggtgcgtcttgttgggtcatgcggaattgcgccagcaggtgttccacttccagcgaagtacggcaggccattgcctggttgagcaacttgcggcactcacggctatcaagttgcgccatccgagctttcgccgccggaattgatggtgcgctcatgctgagttcatccagccctaagccgaccagcaacggcagcacggaacctttcgctcccagctcaccgcacagaccaatccatttgccctggcgatgcaccgcttgcacggcgtaatcgagcgcccgcaagaatgccggattcaggctgttgtagtgacgagtaaccttagcgttatcgcgatccactgccagcagatattgcgtcaggtcattactaccaatactaaagaaatcaatctcttcgcagcattgatcgatgatgaacatcaccgacggcacttccagcatgatgccgagctggattttctcatcaaacggaatgtgttcgttacgtagttgctgtttggcttccgccagtttttctttcacccataagatctcttccattgaggagatcatcgggatcatgattttcaggctgccgtgagcggaggcgcggaggatcgaccgtagctgcgtggtaaacaacgacgcgtactcttcataaatacgcacggcgcgataaccgaggaacgggtttgcctctgcgggaatgttcagataatcaacgggtttgtcgccgccaatgtccatagtgcgcacaataatgctgcgtccgttggcggattccagcgcctgacaaaaaatgttgtacaactcgctttcgcccggtgcgctggtgcgatccatatagagcatttcagtgcggaacaaaccaacgccttccgcaccattgccgaatgcggcctgcgcttccacggagtgagcgatgttagcggcaatttcaatgcggataccgtcagcggtacgggcttgttgggtcagccagacacgctgttgctcacgcagggcgtcctgtacgcgggcttcttgctgataataacgagctacggcttcccctggctcaaccacaatcgccccggcgttgccgtcgatataaatcgtttgttgctgccacggagtaagggcatcaatatccacaccaaccagcgttggaatgttgaacgaacgggcaaggatcaccgtatgtgaggtggtgccgccgcttttgagcaacaatcctttgaggtgatttttatccagttcgaggaactggctgggggtcagttcatcagccatacaaatggcgggctgcgtcagttttcccggtgccgggaagcgttgctcaccgtagatttgctggagtaactggaagcagacgtcgcgtacgtccagggcacgttcttgcaggtagctgctgctggaacgggaaaactcttcgcaaaagtgattcgcgctggcaacaattgcttcggcgcagcttaatccggcgctgacgcctgccagtaaatgttcgcgcagggaagtatcgccagccagggatcggtgagcttccagaatcgcgctggtagcaccgtcgctatccagcagacgaaactcaatgtttttcagtaccagcgtcaggccgttttccagtgcggattgctcggcgtcaacgcctttggctgcgggaagattacccagcgcattgagatctaaagaagagatcggcgtcagaatgccgcctgcactaccgctgcacacggtgcgggcgcggataatttgcggattcagattggtcagtgaaaccggcagtggttccagttcgtcagatttaacttccgccagcggcgcatcgcagtgggggaattcatcgcgcagccattggcttaaacgctggtgcgcttcctgttcgtcggccccggaaatcagtaactggcagttatcgcccgccagcgtatcggtgccaatcagcgcaagggcgcttttggcgttgcccttgcggtcagtgcgcaggttatgccactcaatttgtgatgaaaaagtattacacagcgtttcaacgtggcttgccggacgcgcatgtacgccgttaggtagctcacaaataaattccacaatcagggccattgcctctctcccggtacggttttctgtttacaggataagagcgcacggcaacggcctgccatgtgacaaatctgccaaaagctggacaaatgtaatgtaaccgtcaatttgcgacgcgtctcacaagacgctgttttgcggcatgcttccggtttatcgcaagttatgaggcggatcgcatttttgtactgatattacaaaagtccagtaaatggcctttttatccactgtttgctccgcctgcgattgcctattgtttcctccatcaaaaatatggacatgggctttcgcaagcccgggagcagcttatgaatgagttggtgcagatcctgaaaaatacccgtcagcatttaatgacgggcgtttcacacatgattcccttcgtggtatcgggcggtattttgctggtggtttccgtcatgttgtatggcaaaggcgcagtgccggatgccgtagccgatccaaatctgaaaaaactgtttgatatcggcgttgcgggcttgacgctgatggtgcctttcctcgcagcgtacatcggttattccattgcagagcgttctgcgctggctccgtgcgctatcggtgcctgggttggtaacagctttggtgcgggcttctttggtgcactgatcgccgggattatcggcggcatcgtggtgcattacctgaagaaaattccggtgcataaagttctgcgctcggtgatgcctatcttcattattcctatcgtcggcacactgattaccgcaggcatcatgatgtggggcttgggcgagcctgtaggggcgttgaccaacagcctgactcagtggcttcaggggatgcagcagggcagcattgttatgctggcggtgatcatgggtctgatgctggcgttcgatatgggcggtccggttaacaaagtggcctatgccttcatgctgatttgcgttgctcagggtgtttataccgtggtggccatcgctgccgtgggtatttgtatcccgccgctggggatggggctggcgacgctgattggtcgtaaaaatttctccgcagaagagcgcgaaaccggcaaagcggcactggtgatgggctgtgttggcgttactgaaggggcgattcctttcgccgctgccgatccgctgcgtgtcattccttccatcatggtcggttcagtttgtggtgcagtaactgcggcgctggtcggtgcgcagtgctatgcaggctggggtggtctgattgtgctgccggtggttgaaggcaagctgggttatatcgcagcagtggctgtcggagcagtggtgacggctgtttgtgtgaacgtgctgaaaagtctggcgcgtaaaaatgggtcttcgactgatgaaaaagaagacgacctggatttggattttgaaattaattaattgaggaacgagccatgacgaaaattattgcagtaaccgcatgtccttcaggtgttgcccatacctatatggcagcagaggcgctggaaagtgccgcgaaagcgaaaggctgggaagtgaaagtagaaacccaggggtcaattggtctggaaaatgaactgactgcggaagatgtggcgagcgctgatatggtgattctgaccaaagatatcggcatcaagtttgaagagcgttttgctggcaagaccatcgtgcgcgtcaacatcagcgatgcagtaaaacgtgctgacgccattatgagcaaaattgaagctcacctggcgcaaaccgcttaagttcttctcccgctcgcaagggcgggttcgctttcccacaggagttcctcatgacgaatcgtatctctcgcctcaaaactgcactgtttgccaatacccgtgaaatctcgctggagcgggcgctgctttataccgccagccatcggcaaaccgaaggcgaaccggtgatattgcgccgggcgaaagcaacagcgtatatccttgaacatgttgaaatttcgattcgtgatgaagaactgattgccggtaaccgcaccgtaaaaccgcgcgccgggattatgtcgccggaaatggacccttactggctgctgaaagagctggatcaattcccgacgcgtccgcaggaccgctttgctatcagcgaagaagataaacgtatctaccgtgaagagttgttcccgtactgggaaaaacgttcgatgaaagatttcatcaacgggcagatgacagatgaagtaaaagccgcgaccaacacgcagattttcagcatcaaccagacggataaaggccaggggcacattattattgattacccacgcctgttgaatcacgggctgggtgagctggtggcacagatgcagcaacattgtcagcaacagccggagaatcacttttatcaggccgcgttgttactgctggaagcctcgcagaaacacattttgcgttacgccgaactggcggaaacgatggcggcaaactgcacagatgcccagcgtcgcgaagagctgctgactattgcagagatctcccgccataacgcgcaacataagccgcagacgttctggcaggcgtgccagttattctggtacatgaacatcattctgcaatacgaatccaacgccagttcgctatcgttggggcgcttcgaccagtatatgttgccgttctatcagacatcattaacccagggcgaagatgcggcgttcctgaaagaactgctcgaatctttatgggtgaaatgcaacgacatcgtgctgttgcgctccaccagtagcgcgcgttatttcgccggtttcccgaccggctataccgcactgctcggcgggttaaccgagaacggacgtagcgcggtgaacgtgctttcgttcctttgccttgacgcctatcaaagcgtgcaattaccgcaaccgaacctcggcgtgcgcactaacgccttgatcgacacgccgttcctgatgaaaaccgccgaaaccattcgcttcggcaccggtattccgcaaatctttaacgatgaagtggtggtgccagcgttcctcaaccgtggcgtttcgctggaagatgcgcgcgactattccgtagtgggctgtgtggaattatctattcccggcagaacctacggcttgcatgacatcgcgatgtttaatctgctgaaagtgatggaaatctgcctgcatgaaaatgaaggcaatgctgcgctgacttatgaaggtttactggagcagatccgcgccaagatcagccactacatcaccctgatggttgagggcagcaatatttgtgatatcggccatcgcgactgggcacctgtaccgctgctctcatcgtttatcagcgattgtctggaaaaaggccgcgatattaccgatggcggcgcgcgttataacttctccggcgtacaggggatcggtatcgccaacctgagcgattctctccatgcgttgaaagggatggtttttgagcaacagcgtttaagttttgacgaattgctgtcggtattaaaagccaacttcgcaacgccagaaggcgaaaaagtccgcgctcgcttaattaaccgcttcgagaaatacggtaacgatatcgacgaggtggataacatcagcgccgaactgttgcgccactactgcaaagaagtggaaaaataccagaacccgcgcggcggctacttcacgccgggatcgtataccgtttctgctcacgtcccgttgggatcggtggttggcgcgacgccagacggtcgttttgccggagaacagctggcagacggcggcttgtcacccatgctgggccaggacgcacaagggccaacagcggtactgaagtcagtcagtaagctcgataacacgctgctgtctaacggtacgttgctgaacgtgaaattcactccggcgaccctggaaggtgaagcaggattacgcaaactggccgacttcttacgggcgtttacccagcttaagttacaacatattcagtttaacgtggtgaacgccgacacgttgcgggaagcgcaacagcgcccacaagattatgccgggctggtggtgcgcgttgccggatacagcgccttctttgtcgaactgtcgaaggagatccaggatgacatcatccgccggacagcgcatcagctgtaacgttgtggaaacgcgccgcgatgatgtggcgcgcattttcaacattcagcgttattcactgaatgacggcgagggcattcgtacggtggtcttttttaaaggctgtccgcatctttgcccgtggtgtgctaatccggagtcgatctccggcaaaatccagacggtacgcagagaggcgaaatgtctgcactgtgcgaaatgtttgcgtgatgcggatgaatgcccctccggggcgtttgaacggattggtcgcgatatcagccttgacgctctggaacgggaagtgatgaaagatgacattttctttcgcacgtccggcggcggcgtcacgctttctggcggcgaagtgttaatgcaggcggagtttgctacccgttttttacagcgactgcggctgtggggtgtgtcatgcgccattgaaactgccggagacgcaccagccagcaagctattaccgctggcgaaattgtgcgatgaagtgttgttcgatttaaaaattatggacgcgactcaggcgcgggatgtggtgaagatgaacctgccacgcgtgctggagaatctgcgtttgctggtgagtgagggcgtcaacgtgatcccgcgtttaccgctgatccctggtttcacgctcagccgggagaatatgcagcaggcgctggatgtactgatcccgctgaatatcaggcagatccatctgttaccgtttcatcagtacggcgaaccgaaataccgcctgctggggaaaacatggtcgatgaaagaggtgcctgcgccgtcgtcagctgatgtggcaacgatgcgcgaaatggcagaacgggccggacttcaggttaccgtgggaggttaaaatggcatacctggtggcagtaaccgcctgcgtaagcggcgtggcgcatacttatatggcggcggaacggctggaaaagttgtgcctgttagagaagtggggagtcagcattgaaactcagggcgcgctgggaacggagaatcgtttagcggatgaggatatccgccgggcggatgttgctctgttgattacggatatcgagcttgccggtgccgagcgatttgaacattgccgctatgtgcaatgcagcatctacgcattcctgcgtgagccgcagcgggtaatgagcgcggtgcgcaaagtgctttctgcgccgcagcaaacccatcttattctggagtagtcggtttttctgtcagttggctgtggtactgccggcgatattccgacggcgagcgttcggtgtttttacgaaacagacggcagaagtagttgctgtcgacaaagccgcaggcgtgcgccacttcttttaccttcaggtcatagcctttcaataacgtcttagcgtgctccagtcgcgtgtgattcaggtattcgttaaaaccaatggcccccgttttttgaaacaggtgcgagaggtaatttggcgaaatataaaacgcctgtgcaacagattcgcgggtaagcgcggaggcatagcgttcgtcgatataatcgcgaatagcttcaaatagtgcctggctgcgtgaggcggtctggatttggctgccaagcaaatcgcggcagtggctaagcaggctggcgacgataagccttgccgtttgctgctcctgcggctgcatttgcatttcattgagcgtttgtagcagaaaagaacctatgcgtgggccgcgtcgggcgacgtgttgcttcgccagattttgatattgtttgccatcccattgcacgacgctgaagccgagttgctgtttgccaaacagcacgctaaaggtagtagcgggggcttgccattgtggaaaattccagccaccagcaggaacgtacagcacatcgccgggaactaacgttgctccagcgccggtatcaacaaactcaccttccagcacaatttccagccgtggaaaatcgacctgatacgcaagatcgggcaccgggccgttactgctggcaaagtaaatctggcgcagggacagcgggccgttgatcaggcgggagagcagatagctgacgtcgtgatacatgttattcccttaggtatgtagacgggaaaacagtaactggcattattaaaaaaggccacctgaaaagtgtggcctgaggggagttcgatgtaaacattgcggcagttgtattgccggatgtggcgtaaacgccttatccagcctaccgccgcgatctgtaggccggataagacgcgtcaagcgtcgcatccggcaaatagcgcctggctgataattactgattacccacctgatcgccatagggcagtgtgtcgtaatcgatcagtgcgtttttcttatacgggttaccaatccagcgggtagtttctttgaactgcggattcaccactgaacgggttggatcgtaaccgtcgtaagataagcccgccaaatctgaccaggtgtggatcagttccgccaggctgtatttacgatcaacatcctgcgagaaatcacggggatgagtcgcttgccatttttctgacgtccacagcaggaacggaatggtgtacatatgacgcgtcgggttgtcctcattacgcccctgagttttgtgcggcggcgtgtcgtaaacctcttcaccgtggtcagagaaataaaccaggaaaccgttcgggtttgctgctttaaagtctttaatcaggctggcaaccacatgatcgttatacaggttagcgttgtcataatcgttatatgactccagctcttccgcgtttaatcccggcggaacatgatcggtattgccatcaaacttgccctgattttccgggtagcggtatttgtatttgatatgcgtacccagcagatgaacaatgatcagtttcttcggcgcagggtcattcagcacttcctggaacggcttcagcacgttggtgtcgtattcacgcgcactctgcgtacgttgctggttcatgtagtactgcttgtcggtctggcgcgaaaataccgtcagcatggtattgcgggcggtcatcgtctgctggttggtgatccagaaggttttataacccgcctgtttcatcatgttcatcagcgacggctgcgtcagatacagatccgggttcttttcattggcaaaggtcagcgcctgttgcaggatttcaatggtgtacggacgagacgtaactacgttattaaacacggtcagattcggatcggttttatgcagcgcatccagctccggcgtggtttcacgcggataaccgtacagactcatgcgtccgcgctgggtcgactcgccaatcaccagcactaaagtgcgcggttcgttacccgattcatctttgaaattagccagtggcggcaaggcattattttcattcagtaactttgttagcgagtttagttgctgacgatactgataatagccggtcaggaattgccacggtgcggcaggctccatacgcgaggccaggttatccaacgttttctcaaacggcttgtttttgataaacgtattcatggcgatcggatgcagaatcaagccataaagcagggcaaaagagacaacataacgccacggctttggaatatagaccgggcgcaggcgtgtccacagcagaactgccaccgccgtataggccagcgcgataagcacaattttcaggctgaaatactggcttaaatactcgctggcttcgttggtgttggtttcgaacatcacaaacagaacgctctgcgagaactcctgaccgtagatgacgtagtagcacagcgccgccagagaggccgcccatagcaccacgccgattactgcggcaataattttaatccgcttcggaaagaggaataccgggatcaaccacagcgaactgaataacagcgagtcgcgaatgccgttagtgccactataaccactgatgtaaataatggcctgtagcagagtagagaaaaaccaaaagtagagcagtgcccaacccagggctttccagctaaaaagaggtttagcctggacttctgtggaatgcatagtaagaacctgtcttgaaaaaatatcgccgaatgtaacgacaattccttaaggatatctgaaggtatattcagaatttgaataaaatgcagacagaaatatattgaaaacgagggtgttagaacagaagtatttcagaaaaccctcgcgcaaaagcacgagggtttgcagaagaggaagattagccggtattacgcatacctgccgcaatcccggcaatagtgaccattaacgcttgttcgacgcgaggatccggttcctggccttctttttctgcctggcgggagcggtgcagcaactcggcctgcaatacgttcagcgggtcggtgtaaatattccgtagctgaatagactctgcaatccacggcagatcggccatcagatgggaatcgttggcaatcgccagcaccactttgatgtcttcttcttgcaggttgcgtaactctttacctaacggccacagtgctttgtctaccaggcgttggtcatagtattccgccagccacaggtctgctttggcgaagaccatctccagcatgccgagacgcgtcgagaagaatggccaatcgcggcacatagcctccagctcgctctgtttgccgtcttcgaccactttttgcagcgccgtacctgcacccagccaggcggggagcatcagacggttttgcgtccaggcgaagatccacggaatggcgcgtagtgactcgacgccgccggttgggcgacgtttcgccggacgtgaacccaacggcagtttgcccagttcttgttccggcgtagcggagcggaagtaaggcacaaaatctttgttttcacgtacgtagccgcggtagacatcgcaggagatgactgacagttcatccataatgcgacgccagctctctttcggctccggcggtggcagcaggttggcttccagaatcgccccggtataaagcgacaggctgctgacggtgatttctggcagaccatatttaaagcggatcatctcgccctgttcggttacgcgcaggccgcctttcaggcttcctggcggttgtgacagcagcgccgcatgagcaggtgcgccgccgcgaccaatggaaccgccgcgaccgtggaacaacgtcagctcaatacccgctttttcgcaggttttgattaatgcatcctgtgcctgatattgcgcccaggaagctgccatcactcccgcatcttttgctgagtcggaatagccaatcatcaccatctgtttgccctgaatcaggccacgataccagtcaatattgagcagctgggtcatgacatcgttggcgttgttcagatcatcgagggtttcaaacagcggagcaaccggcatcgcaaacccgatacccgcttctttcagcagcaggtggacagccagtacgtcggacggcgttttcgccatcgagatcacgtaggcggcaatggagccttgcggtgcttcggcaatcacctggcaggtatcgagcacttcgcgcgtttcggcgcttggttgccagttgcgcggcagaagcggacgtttggagttcagttcgcggatcaggaacgcctgtttgtcggcctctgaccagctttcgtagtcgccgataccgaggtagcgggtcagctcgcccagcgcttcggtatgacgcgtgctctcctgacggatatcaatacggaccagcggtacgccgaaacatttcacgcggcgcagggtgtcgagcagatcgccgttggcgataatacccatgccacacgcctgaagtgactggtagcaagcgtagagcggttcccacagttcttcgttttgtgtcagcaggccttctggttttggcagttcttcgcctttcaggcgcgcttccagccatgcctgtgtcgccatcaggcgagaacgcaggtttttcatcagatagcgatacggttctgcggcaccttcttcgccaaccagcgccagcagttcaggggtcgcttcaaccatcgacagttcagaaaccagcacctgaatatctttcaggaacaaatcggtggctttccagcggctgagtagcaggacgtggcgggtgatatcggcagtgacgttcgggttgccgtcgcggtcgccgcccatccacgaagtaaaacggaccggaacaaattcgacgggcagtttgtagccgaggttctcttccagttgttcgttcagttcgcgcaggtaatttggtacgccttgccacaggctgttttccactacggcaaagccccatttggcttcatctaccgggcttggacgcagcttacggatttcatcggtatgccatgactgggcgatcaactggcgcaggcgacgcatcagctggttgtgttcgtagtcagcgatatctttgttatcgagctgttttaaacaggcgttcacttccaccattttgtggatcagtgtacgacgggtaatttcggttgggtgagccgtgaggaccagttccagcgacagcgattccactgcttttttgatggtgtcttcgctcagttccggctggtttttcagtttacgcagggtgcgggcgatcacttccgggttgctggcagcttcgcctttcggcgaaatgctgtggtattgctcggcggtgttggccaggttcaggaactgactaaacgcacgcgcaacgggcagcagctcgtcgttcgacaaattttgtaaggtggtgagcaactcctggcggttagcatcattgccagcgcgtgaagatttcgacaacttacggatagtttctacgcgttcaagaatgtgttctcccaacgcatccttgatggtttctcccagcactttgccgagcatactgacattactacgcaatgcggaatattgttcgttcatattaccccagacaccccatcttatcgtttgatagccctgtatccttcacgtcgcattggcgcgaatatgctcgggctttgcttttcgtcgtcttttataaagccacgtaaaagcggtgacgtcaaatgctgcgaaatcgcttcagcaaacgaataaatagcaggaatttacgtcattaaattcacgacgctttaaataagcgtaacttatggaaatgttaaaaaatcgccccaagtaacaccaaaggtgtaggtcggataagatgcgcaagtatcgcatccgacattattgcggcactggagtttggcaacagtgccggatgcggcgcgagcgccttatccggcctacagttgggcatcgtttgagtcactgtcggtcggataagatgcgcaagtatcgcatccgacattattgcggcactggagtttggcaacagtgccggatgcggcgcgagcgccttatccggcctacggttgggcatcgtttgagtcactgtaggtcggataagatgcgcaagcatcgcatccgacattattgcggcactggagtttggcaacagcgccggatgcggcgcgagcgccttatccggcctacgttttaatgccagcaaaaatggtgaattacctgggttatcagttcgcgggtgggcttgataaaccgtgtttccagatattcatcaggttgatgagcctgattaattgagccaggccccaacaccagcgtcgggcataacgtttgaataaacggcgcttcggtacagtagttcaccacttcggtttttgctccgagcaatttctcaaccacttcaaccagttgatgattcggtgggcattcatagccagggatcggcggatgcagctcgtcgaccgtcagacgacccggccagcgttcgctcaccggagccaatgcatcgttgagcaaaccattaagttcattgagtgtcatgccaggcagcggacgaatatccatatgcaactcacagcaagcgcaaatacggttagaagcgtcgccaccgtgaatatgcccgaggttgagcgtagggtatggcacggtaaacgcttcgtagtgataacgttctttcaggttatcgcgcaattgcaaaatatgcccgatggcgtcgtgcattagttcgatagcgttaactccgcgtgctggatcgctggagtgccccgactggccctgaatacggatggcgttagagatatgacctttatgtgcgcgtaccggttgtagtgacgtcggttcgccaatgatggcgcaatccgggcgcagggcggtagtttcggcaaaataacgcgctccggccatactggtttcttcatcagcagtcgccagaatgtagagcggttttttcagtttcgtgacgtcgacatcgcgtagcgcatcaaggataaacgcaaaaaagcctttcatgtcggcggtgcctaagccgtaaagcttgccgtcatgctccgtcagtgtaaacggatcgcgcgtccagcgaccgtcatcaaatggcaccgtatcggtatgccccgccagcaacaagccgccagccccctgtccgatacttgccagcatattgaatttgttgcgagttcctggaacaggctgcacttccacattgaagcccaaatctttaaaccagtccgccagcagagtgattaaatctgcattgctttgatcgagtgcctcttccgtggcgcttattgaaggtgtggcaatcagagcgcggtaaatctcgataaatggcggtaatttgtttttcattgttgacacacctctggtcatgatagtatcaatattcatgcagtatttatgaataaaaatacactaacgttgagcgtaataaaacccaccagccgtaaggtgaatgttttacgtttaacctggcaaccagacataagaaggtgaatagccccgatgttgaatacgctgattgtgggtgccagcggctacgctggcgcagagctagtgacctatgtaaatcgccatccgcatatgaacataaccgctttgactgtttcagcgcaaagcaatgatgcgggaaagttaatctccgatttgcatccgcagctaaaaggcatcgttgatctgccgttgcagccgatgtcggatatcagcgagtttagcccaggggtggacgtagtgtttctcgccaccgcccatgaagttagccacgatttagcgccgcagtttcttgaagcgggctgcgtggtgttcgacctttccggcgcgtttcgtgttaacgacgccaccttctatgaaaaatattacggctttacccatcaatacccggaactgttggaacaggcagcctacggtctggcggagtggtgcggtaataaattaaaagaagcgaatttgattgcggtgccgggctgttatccgacggcggcgcagctggcgctgaaaccgttgattgatgccgatcttcttgacctcaatcagtggccggtgatcaacgccaccagcggcgtgagcggtgcagggcgtaaagcggccatttcaaacagcttttgtgaagttagcctgcaaccgtatggcgtctttactcatcgccatcaaccagagatcgccacacacctcggtgctgacgttatcttcaccccacatctgggcaatttcccgcgcggcattctcgaaaccattacctgccgcctgaaatcgggtgtgacccaggcgcaagtcgcgcaagtgttacagcaggcgtatgcccataaaccgctggtgcggctgtatgacaaaggcgttccggcgctgaaaaatgtcgttgggctgccattttgcgatatcgggtttgccgttcagggcgagcatctgattattgtggcgaccgaagacaacttactgaaaggcgcggcggcacaagcggtacagtgcgccaatattcgtttcggctatgcggaaacgcagtctcttatttaagggtgcaatgatgaatccattaattatcaaactgggcggcgtactgctggatagtgaagaggcgctggaacgtctgtttagcgcactggtgaattatcgtgagtcacatcagcgtccgctggtgattgtgcacggcggcggttgcgtggtggatgagctgatgaaagggctgaatctgccggtgaaaaagaaaaacggcctgcgggtgacgcctgctgatcagatagacattatcaccggagcactggcgggaacggcaaataaaaccctgttggcatgggcgaagaaacatcagattgcggccgtaggtttgtttctcggtgacggcgacagcgtcaaagtgacccagcttgatgaagagttaggtcatgttggactggcgcagccaggttcgcctaagcttatcaactccttgctggagaacggttatctgccggtggtcagctccattggcgtaacagacgaagggcaactgatgaacgtcaatgccgaccaggcggcaacggcgctggcggcaacgctgggcgcggatctgattttgctctccgacgtcagcggcattctcgacggcaaagggcaacgcattgccgaaatgaccgccgcgaaagcagaacaactgattgagcagggcattattactgacggcatgatagtgaaagtgaacgcggcgctggatgcggcccgcacgctgggccgtccggtagatatcgcctcctggcgtcatgcggagcagcttccggcactgtttaacggtatgccgatgggtacgcggattttagcttaagttttgttggccggaggcgcagctttccggcattgaatttcaaaataaggaaacagagttatggcactttggggcgggcgttttacccaggcagcagatcaacggttcaaacaattcaacgactcactgcgctttgattaccgtctggcggagcaggatattgttggctctgtggcctggtccaaagccctggtcacggtaggcgtgttaaccgcagaagagcaggcgcaactggaagaggcgctgaacgtgttgctggaagatgttcgcgccaggccacaacaaatccttgaaagcgacgccgaagatatccatagctgggtggaaggcaaactgatcgacaaagtgggccagttaggcaaaaagctgcataccgggcgtagccgtaatgatcaggtagcgactgacctgaaactgtggtgcaaagataccgttagcgagttactgacggctaaccggcagctgcaatcggcgctggtggaaaccgcacaaaacaatcaggacgcggtaatgccaggttacactcacctgcaacgcgcccagccggtgacgttcgcgcactggtgcctggcctatgttgagatgctggcgcgtgatgaaagccgtttgcaggatgcgcttaagcgtctggatgtcagcccgctaggctgtggcgcgctggcgggaacggcctatgaaatcgaccgtgaacagttagcaggctggctgggctttgcttcggcgacccgtaacagtctcgacagcgtttctgaccgtgaccatgtgttggaactgctttctgctgccgctatcggcatggtgcatctgtcgcgttttgctgaagatctgattttctttaacaccggcgaagcggggtttgtggagctttctgaccgcgtgacttccggttcatcattaatgccgcagaagaaaaacccggatgcgctggagctgattcgcggtaaatgcggccgggtgcagggggcgttaaccggcatgatgatgacgctgaaaggtttgccgctggcttacaacaaagatatgcaggaagacaaagaaggtctgttcgacgcgctcgatacctggctggactgcctgcatatggcggcgctggtgctggacggcattcaggtgaaacgtccacgttgccaggaagcggctcagcagggttacgccaacgccaccgaactggcggattatctggtggcgaaaggcgtaccgttccgcgaggcgcaccatattgttggtgaagcggtggtggaagccattcgtcagggcaaaccgctggaagatctgccgctcagtgagttgcagaaattcagtcaggtgattgacgaagatgtctatccgattctgtcgctgcaatcgtgcctcgacaagcgtgcggcaaaaggcggcgtctcaccgcagcaggtggcgcaggcgattgcttttgcgcaggctcggttagggtaagaacatttatatgtataaatttgagcctggcttatcgccgggcttttttatggcaaaaaaaagcggatcctggagatccgcaaaagttcacgttggctttagttattcgagttgagaaactctcgaaacgggcagtgacttcaagggttaaaagaggtgccgctccgtttctgtgagcaattatcagtcagaatgcttgatagggataatcgttcattgctattctacctatcgccatgaactatcgtggcgatggaggatggataatgaatattcgtgatcttgagtacctggtggcattggctgaacaccgccattttcggcgtgcggcagattcctgccacgttagccagccgacgcttagcgggcaaattcgtaagctggaagatgagctgggcgtgatgttgctggagcggaccagccgtaaagtgttgttcacccaggcgggaatgctgctggtggatcaggcgcgtaccgtgctgcgtgaggtgaaagtccttaaagagatggcaagccagcagggcgagacgatgtccggaccgctgcacattggtttgattcccacagttggaccgtacctgctaccgcatattatccctatgctgcaccagacctttccaaagctggaaatgtatctgcatgaagcacagacccaccagttactggcgcaactggacagcggcaaactcgattgcgtgatcctcgcgctggtgaaagagagcgaagcattcattgaagtgccgttgtttgatgagccaatgttgctggctatctatgaagatcacccgtgggcgaaccgcgaatgcgtaccgatggccgatctggcaggggaaaaactgctgatgctggaagatggtcactgtttgcgcgatcaggcaatgggtttctgttttgaagccggggcggatgaagatacacacttccgcgcgaccagcctggaaactctgcgcaacatggtggcggcaggtagcgggatcactttactgccagcgctggctgtgccgccggagcgcaaacgcgatggggttgtttatctgccgtgcattaagccggaaccacgccgcactattggcctggtttatcgtcctggctcaccgctgcgcagccgctatgagcagctggcagaggccatccgcgcaagaatggatggccatttcgataaagttttaaaacaggcggtttaaaccgtttaacgcagctacccgataggcttccgccatcgtcgggtagttaaaggtggtgttgacgaagtactcaatagtgttgccgccacctttctgttccataatcgcctgaccgatatgaataatttcggcagcgcgctcgccaaagcagtgaatacccagaatctcttttgtttcccgatggaacaaaattttcagcgtgcccacgttcatgccgacgatttgtgcgcgtgccagatgtttaaactgggcgcggcccacttcatatggcactttcattgcggtcagctgctgttcggttttgcccacagagctgatttccgggatggtgtaaataccggtagggatatcttcaatcagatgtgcggtggcttcgccttttaccagcgcctgcgcggcaatgcgcccctggtcataggccgccgacgccaggctcggataaccaatcacgtcgcccaccgcgtaaacgtgtggctgtgcggtctgatacatgctgttgaccttcagctgtccgcggctgtcagtttctagcccaatgttctgtaacgccagcgaatcggtattaccggtgcgaccgttggcatagagcaggcagtcagctttcagttttttacccgacttcagatgcatgatcacaccatcgtcacagccttcgatcttctcgtactcttcgttgtgacgaatcactacgccactgttccagaagtgataggagagagaatctgacatctcttgatcgagaaatgccagcaggcgatcgcgggtgttgatcagatccacttttacatccataccgcggaagatcgacgcatattcacagccgatcactccagcaccatagataagtacatggcgcggttcgtggtgcatgctgagaattgagtcgctgtcgtaaatgcgtggatgggtgaaatcaacatctgttggatgatatggacgagagccgcaggcaataacaaatttttcagcggttagtgtttcaacgctgccgtccgggcaatccagcgccaacgtatgctcgtcaacaaagcgagcgtttccctgcaatatttcacagtgattacgttcgtaaaatccctgacgcatgcgcgtttgttgattaatcacgttatcggcatggttaaggatatcggcaaaagaagagcggagcagtcgggaatggtcgctgtaaagtgggttttgattgaattctataatgcggctgacggcgtgacggagagctttcgacgggatggtgccccagtgggtgcaaccgccgccaacattttgataacgctcgataactgcgacgcgcgcaccttgcttaaccaggcccattgcagcgccttcgccgccggggccggaacctattactatggcatcgtaatcgtaggaatgtggcatggtagggcttacctgttcttatacataaaagcaacagaatggtaacattttatcgcgggtaagccaattgatccccgtcatttatctggctatatcctgagcggcctttgctttgtctgtttcttacttttgccctgacgttttattggatttttatcgacgatactctccgtttaagcggcaggtttccgctgtacgtaaaagaaccggccaaagaattgcagtaaatatgttttattgcgttaccgttcattcacaatactggagcaatccagtatgttcattctctggtatagtgccagcagtacttttggcaaggattcagacatcgtgatgggcgtaagagcgcaacaaaaagaaaaaacccgccgttcgctggtggaagccgcatttagccaattaagtgctgaacgcagcttcgccagcctgagtttgcgtgaagtggcgcgtgaagcgggcattgctcccacctctttttatcggcatttccgcgacgtagacgaactgggtctgaccatggttgatgagagcggtttaatgctacgccaactcatgcgccaggcgcgtcagcgtatcgccaaaggcgggagtgtgatccgcacctcggtctccacatttatggagttcatcggtaataatcctaacgccttccggttattattgcgggaacgctccggcacctccgctgcgtttcgtgccgccgttgcgcgtgaaattcagcacttcattgcggaacttgcggactatctggaactcgaaaaccatatgccgcgtgcgtttactgaagcgcaagccgaagcaatggtgacaattgtcttcagtgcgggtgccgaggcgttggacgtcggcgtcgaacaacgtcggcaattagaagagcgactggtactgcaactgcgaatgatttcgaaaggggcttattactggtatcgccgtgaacaagagaaaaccgcaattattccgggaaatgtgaaggacgagtaatgaaacaagcaaatcaagatagaggtacgctgctgctggcgttagttgctggcttatcgattaatggtactttcgcagcgctgtttagctccattgtgccattttctgtattcccgattatttccctggtgctgacggtttactgcctgcatcaacgttatcttaatcgcactatgccggtaggcttgccgggtctggcagctgcctgttttattctcggcgtactgctgtacagcacggtagttcgtgcggaatatccggatatcggctctaacttcttcccggcagtactctccgtcattatggtgttctggattggcgcgaagatgcgtaaccgtaagcaggaagttgctgagtaatcggtattatgccggatgctggcgcatccggcatgggttttacttcgcggtcagtaatacgccgcactccatatggtgcgtgtaggggaactgatcaaacagagccagacgttcgaccttgtgcgtctggcttaatgtttccagattcttgcataacgtttccgggttacaggagatgtacaaaatacgcggatacgcctgcaccattttctcggtttcactgtccagaccgctgcgcggtgggtcgacaaaaatggtttcgcactgataactctttaagtcgatcccttgcaggcggttaaactcgcgcacaccattcatcgcctgagtaaattcttctgccgccatacgaataatttgtacgttatcaatatggttagctgcgatgttgtattgcgcagcagcaaccgacggcttagcgatttcggtggctaatacccgatcaaaattacgcgccagcgctaatgaaaagttaccgttgccgcagtacagctccagtaaatcgccttttgagcctttggttacgtccagcgcccattccagcatctgaatattcatcgccgcgttcggctgggtaaagctgttttctacctgacggtagatcatctctttccctgcgaccggcagacgttcatcgatgtaatcctgatccagctcgattttggttttcgttgcccgaccaatcagatgcacattcagattctgcgcgcgcagtgcatcgcgcagggcctccgcttcctgacgccactcatcatccagcttcttatggtatagcagggaaaccaccgcctgattactcagcgtagtgaggtaatcaatctggaacaacttgtggcgcagaacgggattattacgcacacccgcaatcatcgccgtcatcaactggttgataagttcactggcggcggggaagctatccacgcggatgcggcttttggtttgttgatcgaaaatgatgtgatacaggtcatcgccatcgtgccagatgcggaactccgcgcgcatccggtaatgactgaccggcgagcgaaacacttccggaaccaggtcagaaaacggtgccatcatactttgcaaacgtaccactttttcggctaactgcgcttcatactgttctgttggaaggtgttcgggggtcatgatgtatcctgaaaaattaaagtacgcggcgattgtagggattgctcatcagatgtccagatcttgatgaattcctatttgtgagctacgtctggacagtaacttgttacaacctgtagcatccacttgccggtcctgtgagttaatagggaatccagtgcgaatctggagctgacgcgcagcggtaaggaaaggtgcgatgattgcgttatgcggacactgccattcggtgggaagtcatcatctcttagtatcttagatacccctccaagcccgaagacctgccggccaacgtcgcatctggttctcatcatcgcgtaatattgatgaaacctgcggcatccttcttctattgtggatgctttacaatgattaaaaaagcttcgctgctgacggcgtgttccgtcacggcattttccgcttgggcacaggataccagcccggatactctcgtcgttactgctaaccgttttgaacagccgcgcagcactgtgcttgcaccaaccaccgttgtgacccgtcaggatatcgaccgctggcagtcgacctcggtcaatgatgtgctgcgccgtcttccgggcgtcgatatcacccaaaacggcggttcaggtcagctctcatctatttttattcgcggtacaaatgccagtcatgtgttggtgttaattgatggcgtacgcctgaatctggcgggggtgagtggttctgccgaccttagccagttccctattgcgcttgtccagcgtgttgaatatatccgtgggccgcgctccgctgtttatggttccgatgcaataggcggggtggtgaatatcatcacgacgcgcgatgaacccggaacggaaatttcagcagggtggggaagcaatagttatcagaactatgatgtctctacgcagcaacaactgggggataagacacgggtaacgctgttgggcgattatgcccatactcatggttatgatgttgttgcctatggtaataccggaacgcaagcgcagacagataacgatggttttttaagtaaaacgctttatggcgcgctggagcataactttactgatgcctggagcggctttgtgcgcggctatggctatgataaccgtaccaattatgacgcgtattattctcccggttcaccgttgctcgatacccgtaaactctatagccaaagttgggacgccgggctgcgctataacggcgaactgattaaatcacaactcattaccagctatagccatagcaaagattacaactacgatccccattatggtcgttatgattcgtcggcgacgctcgatgagatgaagcaatacaccgtccagtgggcaaacaatgtcatcgttggtcacggtagtattggtgcgggtgtcgactggcagaaacagactacgacgccgggtacaggttatgttgaggatggatatgatcaacgtaataccggcatctatctgaccgggctgcaacaagtcggcgattttacctttgaaggcgcagcacgcagtgacgataactcacagtttggtcgtcatggaacctggcaaaccagcgccggttgggaattcatcgaaggttatcgcttcattgcttcctacgggacatcttataaggcaccaaatctggggcaactgtatggcttctacggaaatccgaatctggacccggagaaaagcaaacagtgggaaggcgcgtttgaaggcttaaccgctggggtgaactggcgtatttccggatatcgtaacgatgtcagtgacttgatcgattatgatgatcacaccctgaaatattacaacgaagggaaagcgcggattaagggcgtcgaggcgaccgccaattttgataccggaccactgacgcatactgtgagttatgattatgtcgatgcgcgcaatgcgattaccgacacgccgttgttacgccgtgctaaacagcaggtgaaataccagctcgactggcagttgtatgacttcgactggggtattacttatcagtatttaggcactcgctatgataaggattactcatcttatccttatcaaaccgttaaaatgggcggtgtgagcttgtgggatcttgcggttgcgtatccggtcacctctcacctgacagttcgtggtaaaatagccaacctgttcgacaaagattatgagacagtctatggctaccaaactgcaggacgggaatacaccttgtctggcagctacaccttctgaaccacgtcccaccgtgctggtgtttgactccggcgtcggtgggttgtcggtctatgacgagatccggcatctcttaccggatctccattacatttatgctttcgataacgtcgctttcccgtatggcgaaaaaagcgaagcgtttattgttgagcgagtggtggcaattgtcaccgcggtgcaagaacgttatccccttgcgctggctgtggtcgcttgcaacactgccagtaccgtttcacttcctgcattacgcgaaaagttcgacttcccggttgttggtgtcgtgccggcgattaaacctgctgcacgtctgacggcaaatggcattgtcggattactggcaacccgcggaacagttaaacgttcttatactcatgagctgatcgcgcgtttcgctaatgaatgccagatagaaatgctgggctcggcagagatggttgagttggctgaagcgaagctacatggcgaagatgtttctctggatgcactaaaacgtatcctacgcccgtggttaagaatgaaagagccgccagataccgttgtattgggttgcacccatttccctctactacaagaagaactgttacaagtgctgccagagggaacccggctggtggattctggcgcagcgattgctcgccgaacggcctggttgttagaacatgaagccccggatgcaaaatctgccgatgcgaatattgccttttgtatggcaatgacgccaggagctgaacaattattgcccgttttacagcgttacggcttcgaaacgctcgaaaaactggcagttttaggctgatttggttgaatgttgcgcggtcagaaaattattttaaatttcctcttgtcaggccggaataactccctgcaccgaggcgtcgcattcttcagatggttcaacccttaagttagcgcttatgggagtaatccccgcatatccggttgtcaggtcaggatggtaaggcacctgctttacactttcgcccgtggtcagtgatggctgcgggcgaatcgtaccagatgttgtcaattaatcgtgttggcacagcgttatgactatcttttcttttatctgccagtgcacagcaaacatctcattctcacgatgaatgatgacctgctgtttattccagctaattatctgatagtccagaaaacctgcatcagtttggatctcacttgccttaaatgcgctctctttggcggaaaatgccagtgtcagcgccagagaaaaggctaaaccgcagtctgcgagtcgctcgtgttccgctggtgtaataatgttgtctgtcaattctcttgcggtttgtacagaaaaaatttcttctatatcaatgccaatcggttgacgagataccacggctaatgccgtagtcccacagtggctaatactgccgtatacctccgcaggccagacaggttggcgtagctcgccgattgcgggcacacatttatagccatattcccgcaaagcataaacagcagcgatccgtccggctaaatgctctgttttacgtttacgtccagcgtgttgcagttgtgcgtagtgcggcagccagagtaaatcctgctcacaaaaattcgccggatcgaactcaacaaaatgcagcgtatgtccggcaaaggggagggaggtatgcgtagttttcatatcgaccatattcgagactgatgacaaacgcaaaactgcctgatgcgctacgcttatcaggcctacatggtcctgcaatatattgaattggcaagatttttgtaggccggataaggcgttcacgccgcatccggcatgaacgacgcgcactttgtcaacaatctgacgttagcatcagaagtgggtgtttacgctcatataccacgtacgtcccggctcgttataggtatacgccccggcaccggcgatatagttggcccctgccaaatcgcccgtggtctgggcattacccgcacgccacaaacgtttgtcgaacagattgtccacgccgccggtcagactgacattcttcgtcacatcccaggtcgcgctcaggccaacaatgctgtaaggactaatttctttggtttccggtccaaccgctggctgacctttatagttgtacttcttcggctgctgcttgccgtaccaggtgaaggtcgtttgcatcgacaaatcttcccgtgcctgccagctcagcgttgagttcaacgtatactccgggatgatcgacaaacggtcgcccgtggttttgttttcactcttcagcatataagtgatgttattggtccacatcaccgtttcgctaaccggtacgtttaacgatccttccagaccttcaaccaccgctttcggcacgttatcccactgatagagatcggtgccgactgcgttttgccctacagccacatagcccgcttcaatcttattgcgataatcgttacggaaccaggtgacgcccgccagccacccgtcgcgtttgaactccagaccaatctctttgttgatgctggtttctgctttcaggtcatcgttaccttgcagatagcagccgcccgcgctggcatagcaaccctgacctttactgtagagaatgtagttcgggttagtctggtacaggctcggcgctttataagcacgggcgatgcccattttcagcgtgaagtcatcgcctaaaccttgcgatatgttcagcgccgggctccagttattgccgacaatactgtgatgatcgaaacgcagccccggcgttacgatggtgctgtcagtcagctccatgttgttttcggcaaacagcgagaaaatttctgcttttgaatacgggctacggtcggtggtactcacgccatcaatagcgccaccggtattcgttccggtcagtgcctgggtgttggaacttaagtccttcatccgttgctgattccactccgtacccagcgtcagcgtctggttaacgaggaaatcaatcggcaggttaacttcgctgtgcagcatcacgtcatcaagatcgatatcgacgaaatcctgtgtcgctttttcgttaaatttcccttcggtaccgcccgccagaccttccggaatacgcgagttacgggtgtgttcgtactgcacccagttgctggtggtcacgccgttatcccagccaccgttccaggtcagcgcgtagttctggcgatacagacggttggtttcatcgccatatttcgagcgggtataggaatcggagttggtattctgggtgtcgcccgcatacaggttaccctggcggctgtaacctgcttccagttccagcgattgcaatggcgcgaaatcccagcgcaccacgccattaatatctttgttgattaccccttcgcgcccggctggtaacgtcgtggcatacgttccggcacgcgcggactgatggccctggttgatatcccacgcgtcagcctgggttttgtcgaggttgccatacaaacggaagctgaattcgtcgcccagcggaccggtcaggctaaagttagtgcgtttggtggcaccttcctctttatgttctggcgcattgaaatatgcgtcccaggagccgtgccactcgccgctgccttttttggtaatgatgttaaccacgccgcccgccgcgccgttgccataacgcgcagctgccggaccacgcagaacttcaatacgttcaatcatttcaggtggcacccaggaagtatcaccacgggtatcgcgctcgccacgccagccctgacgcaccgagttacggctgcttaccggcttgccgtcaatcaaaatcagcgtgttttccggacccataccgcgaatatcaatctgtcggttattcccacgctgaccactggtggagttaccggtcaggttaacgcctggcatggtacggatgatctccgacacatcgcgggcaaccgggtttttgcggatttcatctgcggtgatggtcgaaacgccaggcgcctgtaagttctgctcggcggcggtaacgacaatagtatcgtcatgtgaaacaggagtatcggtcggctcttgtgcctgcgctaccccataaatccccagattgaccaacaaggccagggaatgaatcttcttgttcattgttttattcctgcatttttgccacgaattgcaactgtcgggcatggtcgtcatcaacacgacgcatcccgctaccgcgaaaacctttgatcctgaaagacacgcagtgcagttggttaattaatgtccgcgcttcccacggcgcgccattacgctattgcaaatgcaaatagttatcaataatattatcaatatatttctgcaatcaatgaaaaattgcacagtaaacatggggttatggtgtgacggcgttaaaagtaggaagtgagagctggtggcagtcgaaacatggcccggaatggcagcgtctgaatgacgaaatgtttgaggtcactttctggtggcgtgatccccaaggttctgaagaatactcgacgataaagcgcgtatgggtctacatcactggtgtgaccgatcaccatcagaacagccagccccagtcgatgcagcgaattgcaggcactaacgtctggcagtggacgacacaactcaatgccaactggcgcggcagctactgctttattcccaccgaacgcgatgacattttttctgtaccatcccccgatcgcctcgaattgcgcgaaggctggcgaaaactattaccccaggcgatagccgatccgctgaacctacaaagctggaaaggcgggcgagggcacgctgtttctgcactcgaaatgccgcaagcgcctctgcaaccgggatgggattgtccgcaagcgccagaaatacctgccaaagaaattatctggaaaagtgaacggttgaaaaagtcacggcgtgtatggatttttaccaccggcgatgcaacagcagaagaacgcccgctggcagttttgctcgatggcgaattttgggcgcaaagtatgcccgtctggccagtgctgacttcgctgacccatcgtcagcaacttcctcccgccgtgtatgtgttgatcgacgctatcgacaccacgcaccgcgcccacgaactgccgtgtaatgcggatttctggctcgcagtacagcaagagttattacccctggtgaaagctattgccccttttagcgatcgtgccgatcgcaccgtggttgccgggcagagttttggtgggctttccgcgctgtatgccggactgcactggcctgaacgctttggctgtgtattaagccagtcaggatcgtactggtggccgcatcggggcgggcagcaagagggcgtgttacttgaaaagctaaaagctggtgaagttagcgccgaaggtctgcgcattgtgctggaagcgggtattcgcgagccgatgatcatgcgggccaatcaggcgctgtatgcgcaattacaccccataaaagaatccattttctggcgtcaggttgacggcggacatgatgcgctttgttggcgcggtggcttgatgcaggggctaatcgacctctggcaaccacttttccatgacaggagttgaatatggcattcagtaatcccttcgatgacccgcagggagcgttttacatattgcgcaatgcgcaggggcaattcagtctgtggccgcaacaatgcgtcttaccggcaggctgggacattgtgtgtcagccgcagtcacaggcgtcctgccagcagtggctggaagcccactggcgtactctgacaccgacgaattttacccagttgcaggaggcacaatgagccagcatttacctttggtcgccgcacagcccggcatctggatggcagaaaaactgtcagaattaccctccgcctggagcgtggcgcattacgttgagttaaccggagaggttgattcgccattactggcccgcgcggtggttgccggactagcgcaagcagatacgctgcggatgcgttttacggaagataacggcgaagtctggcagtgggtcgatgatgcgctgacgttcgaactgccagaaattatcgacctacgaaccaacattgatccgcacggtactgcgcaggcattaatgcaggcggatttgcaacaagatctgcgcgtcgatagcggtaaaccactggtctttcatcagctgatacaggtggcggataaccgctggtactggtatcagcgttatcaccatttgctggtcgatggctttagtttcccggccattacccgccagatcgccaatatttactgcacatggctgcgtggcgaaccaacgcctgcttcgccatttacgcctttcgctgatgtagtggaagagtaccagcaataccgcgaaagcgaagcctggcagcgtgatgcggcattctgggcagaacagcgtcgtcaactgccgccgcccgcgtcactttctccggcacctttaccggggcgcagcgcctcggcagatattctgcgcctgaaactggaatttaccgacggggaattccgccagctggctacgcaactttcaggtgtgcagcgtaccgatttagcccttgcgctggcagccttgtggctggggcgattgtgcaatcgtatggactacgccgccggatttatctttatgcgtcgactgggctcggcggcgctgacggctaccggacccgtgctcaacgttttgccgttgggtattcacattgcggcgcaagaaacgctgccggaactggcaacccgactggcagcacaactgaaaaaaatgcgtcgtcatcaacgttacgatgccgaacaaattgtccgtgacagcgggcgagcggcaggtgatgaaccgctgtttggtccggtactcaatatcaaggtatttgattaccaactggatattcctgatgttcaggcgcaaacccataccctggcaaccggtccggttaatgaccttgaactggccctgttcccggatgtacacggtgatttgagtattgagatcctcgccaataaacagcgttacgatgagccaacgttaatccagcatgctgaacgcctgaaaatgctgattgcccagttcgccgcggatccggcgctgttgtgcggcgatgtcgatattatgctgccaggtgagtatgcgcagctggcgcagctcaacgccactcaggttgagattccagaaaccacgcttagcgcgctggtggcagaacaagcggcaaaaacaccggatgctccggcgctggcagatgcgcgttacctgttcagctatcgggaaatgcgcgagcaggtggtggcgctggcgaatctgctgcgtgagcgcggcgttaaaccaggggacagcgtggcggtggcactaccgcgctcggtctttttgaccctggcactccatgcgatagttgaagctggagcggcctggctaccgctggataccggctatccggacgatcgcctgaaaatgaggctggaagatgcgcgtccgtcgctgttaattaccaccgacgatcaactgccgcgctttagcgatgttcccaatttaacaagcctttgctataacgccccgcttacaccgcagggcagtgcgccgctgcaactttcacaaccgcatcacacggcttatatcatctttacctctggctccaccggcaggccgaaaggggtaatggtcgggcagacggctatcgtcaaccgcctgctttggatgcaaaatcattatccgcttacaggcgaagatgtcgttgcccaaaaaacgccgtgcagttttgatgtctcggtgtgggagtttttctggccgtttatcgcaggggcaaaactggtgatggctgaaccggaagcgcaccgcgacccgctcgctatgcagcaattctttgccgaatatggcgtaacgaccacgcactttgtgccgtcgatgctggcggcatttgttgcctcgctgacgccgcaaaccgctcgccagagttgcgcgacgttgaaacaggttttctgtagtggtgaggccttaccggctgatttatgccgcgaatggcaacagttaactggcgcgccgttgcataatctatatggcccgacggaagcggcggtagatgtcagctggtatccggcttttggcgaggaactggcacaggtgcgcggcagcagtgtgccgattggttatccggtatggaatacgggtctgcgtattcttgatgcgatgatgcatccggtgccgccgggtgtggcgggtgatctctatctcactggcattcaactggcgcagggctatctcggacgccccgatctgaccgccagccgctttattgccgatccttttgccccaggtgaacggatgtaccgtaccggagacgttgcccgctggctggataacggcgcggtggagtacctcgggcgcagtgatgatcagctaaaaattcgcgggcagcgtatcgaactgggcgaaatcgatcgcgtgatgcaggcgctgccggatgtcgaacaagccgttacccacgcctgtgtgattaaccaggcggctgccaccggtggtgatgcgcgtcaattggtgggctatctggtgtcgcaatcgggcctgccgttggataccagcgcattgcaggcgcagcttcgtgaaacattgccaccacatatggtaccggtggttctgctgcaacttccacagttaccacttagcgccaacggcaagctggatcgcaaagccttaccgttgcctgaactgaaggcacaagcgccagggcgtgcgccgaaagcgggcagtgaaacgattatcgccgcggcattctcgtcgttgctggggtgtgacgtgcaggatgccgatgctgatttcttcgcgcttggcggtcattcgctactggcaatgaaactggcagcgcagttaagtcggcaggttgcccgccaggtgacgccggggcaagtgatggtcgcgtcaactgtcgccaaactggcaacgattattgatgctgaagaagacagcacccggcgtatgggattcgaaaccattctgccgttgcgtgaaggtaatggcccgacgctgttttgtttccatcctgcgtccggttttgcctggcagttcagcgtgctctcgcgttatctcgatccacaatggtcgattatcggcattcagtcaccgcgccccaatggccccatgcagacggcggcaaacctggatgaagtctgcgaagcgcatctggcaacgttacttgaacaacaaccgcatggcccttattacctgctggggtattcccttggcggtacgctggcgcagggtattgcggcgcgactgcgtgcccgtggcgaacaggtggcatttcttggcttgctggatacctggccgccagaaacgcaaaactggcaggaaaaagaagctaatggtctggacccggaagtgctggcggagattaaccgcgaacgcgaggccttcctggcagcacagcagggaagtacttcaacggagttgtttaccaccattgaaggcaactacgctgatgctgtgcgcctgctgacgactgctcatagcgtaccgtttgacggtaaagcgacgctgtttgttgctgaacgcacacttcaggaaggtatgagtcccgaacgcgcctggtcgccgtggatagcggagctggatatctatcgtcaggattgtgcgcatgtggatattatctctccagggacgtttgaaaaaattgggccgattattcgcgcaacgctaaacaggtaaattaatattatttataaacccataattacagaaaataattatgggttttttatttgtttgatttataggtttgatgaatatttctcttaaatagagtgaatgttgcattcagtggaaggaatttacaaacttcagcttcggataattatcaccaactggtaaagtgagcgccgtggagatttccccctattggactcattttcaggttataccccatgtcatcactgaatattaaacagggaagtgacgctcattttcccgattatcctctggcgtcgcccagtaataatgaaattgatttacttaatctaatctcagttttatggcgggccaaaaaaacggtcatggcggtcgtttttgcgtttgcctgcgcaggcttgctgatctctttcatcctgccgcaaaaatggaccagcgcggcggttgtcacgcctccagaacctgttcagtggcaagagttggagaaatcattcactaagcttcgtgtgctggatctggatatcaaaattgatcgtacagaagcatttaacctgtttatcaagaagtttcagtcggttagcttgctggaagagtacctgcgttcatcaccttatgtgatggaccaattaaaagaggcgaaaatcgacgaactggatttgcatcgcgcaattgtcgcattgagcgaaaaaatgaaagcggttgatgacaatgccagtaagaaaaaagatgaaccgtcactgtatacctcctggacgctaagttttaccgcgccaaccagtgaagaggcgcagaccgttttgagcgggtatatcgattatatctctacgttggtggtgaaagagtcgctagaaaacgtccgtaataaactggagatcaaaacccagtttgaaaaagaaaaactggctcaggatcgcattaaaacgaaaaatcaacttgatgcaaacattcagcgcctcaattattcactcgacattgccaacgcggcaggaattaaaaagcccgtttacagtaatggtcaggccgttaaagatgaccccgatttttctatttctctcggtgcagacggtattgaacgcaaactggaaatagaaaaagcggtcactgacgttgcggaactgaacggtgaattacgtaatcggcagtatcttgtcgagcaattaacaaaagcacatgtcaacgatgtgaattttacgccgtttaaatatcagttaagcccgtcattgccagtgaaaaaagacggtccgggtaaggcgattattgtgatcctttccgcgttgatcggcgggatggtggcttgtggtggcgtgctgttgcgctatgcgatggcatccagaaaacaggatgccatgatggcagaccacttagtttaactatttgcggttgaaggtgccgttcgtccgagcggcaccacaagcggcgttccggcaactggatcgtcaatgatcatgcagcgcagaccataaatgcgctcaatcagttcagcagtgacaatctccttcggcgctccctgagcaacaattttcccttcccgcaatgcaatcaaatggctggcgtaacgacaggcctgattaagatcgtgcagcaccgccgccagggtatagcctttttcgcggttcagttcgcttaacaactccagcaaatcaatctgatgactgatatccagccaggtcgtgggttcgtcgagcagcataattgccgtttcctgggccagcaccatcgcgatccacgctcgctggcgttgtccgccagaaagggtatccacgctttgatctgccagatgagttattcccgtggcctgcattgctttcgttaccgcttcttcatcctctttgcgccagcgggtaaacagcggttgatgcggataacgtccacgcgccaccagctcctgcacggtgatatcgcccggcgtggtagcattttgcgccaacagaccaatccggcgtgcaacctctttactggcgtaatgttgaatgtgctcgccatccagccagacatgcccatgagcaggcgtcatcaggcggcttaaggtacgcagtaacgtggatttaccgcagccatttggcccgataattgccgtgaagtgaccatcaggtatttctacagtcagattttccgcaacggtatatttgccatatcccagggttaactgttcgccgcgcaaacgggctactgattcggtcattttttgcgagactcctgaattaacaagacgataaggtaaataccgccgaggctgacggtaacgacgccaaccggaagttgatacggcataaacagttgttgggcgcagagatcggccgccagcagtaacagcgccccgcatagcgccgcctgggttagcccccagcgagcggtgccgctaatgcgtcgggcaatgtgcggtgcgactaaagcaataaaggaaatcggcccggcaagcgctgttgccgcagcggtaagcaccactgcaaccagcatcattaacagacgcgaacgttcgacgctgacgcccagcgcacacgcggtatcatcgcccatttccagcaagcgcatccggcgtaccagtaaggcggcggcaatgagcatcaatataatgatgggtgcggaaggcgaggtttttgcccacgtcaggccgttgagcgatccggcattccacaaacctgctgttagcgccgtttctaaagacgctttcagcaacagccaggtattaaaggccaccagcatggcgcgaacgccgataccgataataatcaaccgaaaggtgtcgatgccgttgcgccaggcgagcagccagaccagcagcgaagtgacaatgccgcccaccattgctgacagcgcgatagccgtcaggtcctgaccaaacagcaccatcgccaccagcacgccgctccacgccccggtgttaaagcccattacgtcagggctgccgagcgggttacgcatcagcgactgaaaaatcgcgccactgacgcccagtgctgcgccaatcaacagcgccatcagcacgcgtggtaaacgccattcggtgaccaccatcgtcatactgcgcggcgcatcgcccatcagcgcggcgaatacctgcgaggtttccagcgtgacggcaccgctgcgtaatccccagatacctgcaaccacacaggcggaaaccagcagcaaacaggtgatgagtaatcggcgagagacgtaaatcatgcaccacctcgcgttttacgtcgcacgaggaagatcagcaccggtgcaccaataaacgcactgaccacagaaacgcgcagttcgccgggcacaatcacccgcccgatgatatcggcaaacagcagcagggcaggggtagcaagtagcgtgacgggcagcgaccagcgatgatcggcacccaccagccaacgcgccatatgcggcatcatcaggccaataaaggcaatcgggccaactattgccgtcgcactaccacaaagcacggtaatcgccagcagaccaatcaactgtgtgcgcgccacgcgactgcccagcgccgtcgcggtgtcgctgccgaggctcaaactgttcagcgcgcgactcagtaatagcgcagttgctccggcgatcagcaccgggatcagcaccacttttaaggtatgtagattgcgaatatccagcgaaccggcttgccagaaacgcaactgatcgtagacgtcaggattaagcagggcgatgccgctggtcagtccttccagcaccgccgccagcgccacgcccgccagggttaaacgcaccggacttaactgcccgccgccctgactgccggtaaaggcaacaatcaatgaggccaccagcgccccggcgaaggccatcgccagttgttcctgcgcggaagagtaaccaaacagcgccgcacccagcacaatggcaaagctggctccggcgttcacgccaagcaagccggggtcggcaagtgggtttcgggtgagggtttgcattaacgccccggcaaggccaagcgcgccgcctgccagtaaaccggcaagggtacgcggcagccgcgcgtcgagcacgatggtgcagtcggcgctctggcaggtgccggagaaggcctccagcactacggaagcggggagtgattttgccccaatgagcaggcttaatgccgtcgcgataatcagtaataacagcaatccgggcacggcaatggcgcgtgtcacggcaacagaaccagacatacgaacttccatgataatgaaattaattatcgttatcgatcttatttggatatgttagcatgtgcagcctaagaataggtatttaaaatatttgatggcaaggcattgtaatgaataaacaatcctggctgcttaacctcagcctgttgaaaacgcacccggcgtttcgcgcagtattcctcgctcgtttcatctcaattgtgtctctgggtttgctcggcgtcgcggtgccggtgcagatccagatgatgacacattccacctggcaggtggggctttcggtgacgctgaccggcggcgcgatgtttgttggcctgatggtcggcggtgtgctggcggatcgctatgagcgcaaaaaagtgattttgctggcgcgcggcacctgtggcattggcttcattggactgtgccttaatgcactgctgccggagccgtcattgctggcaatctatttacttggtttatgggatggttttttcgcatcgcttggcgttacggcgctattggcggcgacaccagcactggtagggcgtgaaaacttaatgcaggccggggcgatcaccatgttgaccgtgcgtctggggtcggtgatttcgcccatgattggcggtttattgctggcgaccggtggcgtagcctggaactacgggctggcggcggcgggcacgtttattaccttgctaccgttgttaagccttccggcgttgccaccgccaccgcagccgcgtgagcatccgttgaaatcattactggcaggatttcgttttctgcttgccagcccgctggtgggcgggattgcgctgctgggtggtttattgacgatggcgagcgcggtgcgggtactgtatccggcgctggctgacaactggcagatgtcagcggcacagattggttttctctacgcggcgatcccgctcggcgcggctattggtgcgttaaccagcgggaagctggcacatagtgcgcgaccagggttattgatgctgctctccacgctgggatcgttcctcgccattggtctgtttggcctgatgccgatgtggattttaggcgtggtttgtctggcgctgttcggctggttgagtgcggtcagctcgttgctgcaatacacaatgctgcaaacgcaaaccccggaagcgatgttagggcggattaacggtttgtggacggcgcagaacgtgacgggcgatgccataggcgcggcgctgctgggtggtttgggcgcgatgatgacaccggttgcttccgcaagcgcgagcggttttggtttgttgattatcggcgtgttgttattgctggtgctggtggagttgcgacattttcgccagacgccgccgcaggtgacagcgtccgacagttaatgcttaaaacagcgccttaagcctatccagcacttgcatggcgctgtagtaatccagacggaacgtctcggttcccagcgcataaacctgcttgttttgtactgcaggcaggtgcgcgagcagcggattagcataaatagcatcggcatctttctgatcaccggcgaacaggaatagtgactcgccatttaaccctgcagccagattttccccaccaagctgaatgatgtcatggcgtttaccctgactttggctggcatttaaccctgcgggtaacttcgccagcgtaaagccgagttgttccagcatctgcccttgtgctgattctggcgtccagagattggcactgtgtgcagcggcagtatagacaatggcagtgaccggctgcggcggtaatttgatttgctctttcgccgccgccagttgcttatcaaactgcgcaatccgctctgccgcttgtttctcatgcccggtaatttcgccaagttgcgttaacagcgactgccagcttttgtcgtcgtaattgatgattaatgtcggggcgatggtggaaagctgatcatacagtgccagcgccgaatccccgccggttgcgctaattaaaatcagatccggcatttgcgcggcaacggcttcggcgctcggttcgccgatatagagccgttgcagtttgcgttctttcgccaccttgctccactggcgtaaaaagccctggtcatccgcgacgcggttattcggcgtggtcgcgccgctggcgatcaccggagcatcaatcgccagcagtgagccggtcagggtgacgctggtggaaacaatacgctgcggctggctttccagtgtatgtgtgccacggctgtcagtaatctgacgcggccagtcagcggcctgaactgcggctattcctgaaagcaaaagtcctgttaatagaagggcgttgcggtagagcggggcgagtctcacaaatcagcttcctgttattaataaggttaagggcgtaatgacaaattcgacaaagcgcacaatccgtcccctcgcccctttggggagagggttagggtgaggggaacagccagcactggtgcgaacattaaccctcaccccagccctcaccctggaagggagagggggcagaacggcgcaggacatcacattgcgcttatgcgaatccatcaataatgcttctcattttcattgtaaccacaaccagatgcaaccccgagttgcagattgcgttacctcaagagttgacatagtgcgcgtttgcttttaggttagcgaccgaaaatataaatgataatcattattaaagcctttatcattttgtggaggatgatatggatacgtcactggctgaggaagtacagcagaccatggcaacacttgcgcccaatcgctttttctttatgtcgccgtaccgcagttttacgacgtcaggatgtttcgcccgcttcgatgaaccggctgtgaacggggattcgcccgacagtcccttccagcaaaaactcgccgcgctgtttgccgatgccaaagcgcagggcatcaaaaatccggtgatggtcggggcgattcccttcgatccacgtcagccttcgtcgctgtatattcctgaatcctggcagtcgttctcccgtcaggaaaaacaagcttccgcacgccgtttcacccgcagccagtcgctgaatgtggtggaacgccaggcaattccggagcaaaccacgtttgaacagatggttgcccgcgccgccgcacttaccgccacgccgcaggtcgacaaagtggtgttgtcacggttgattgatatcaccactgacgccgccattgatagtggcgtattgctggaacggttgattgcgcaaaacccggttagttacaacttccatgttccgctggctgatggtggcgtcctgctgggggccagcccggaactgctgctacgtaaagacggcgagcgttttagctccattccgttagccggttccgcgcgtcgtcagccggatgaagtgctcgatcgcgaagcaggtaatcgtctgctggcgtcagaaaaagatcgccatgaacatgaactggtgactcaggcgatgaaagaggtgctgcgcgaacgcagtagtgagttacacgttccttcttctccacagctgatcaccacgccgacgctgtggcatctcgcaactccctttgaaggtaaagcgaattcgcaagaaaacgcactgactctggcctgtctgctgcatccgacccccgcgctgagcggtttcccgcatcaggccgcgacccaggttattgctgaactggaaccgttcgaccgcgaactgtttggcggcattgtgggttggtgtgacagcgaaggtaacggcgaatgggtggtgaccatccgctgcgcgaagctgcgggaaaatcaggtgcgtctgtttgccggagcggggattgtgcctgcgtcgtcaccgttgggtgagtggcgcgaaacaggcgtcaaactttctaccatgttgaacgtttttggattgcattaaggagcgaggatgagcattccattcacccgctggccggaagagtttgcccgtcgctatcgggaaaaaggctactggcaggatttgccgctgaccgacattctgacgcgacatgctgcgagtgacagcatcgcggttatcgacggcgagcgacagttgagttatcgggagctgaatcaggcggcggataacctcgcgtgtagtttacgccgtcagggcattaaacctggtgaaaccgcgctggtacaactgggtaacgtcgctgaattgtatattacctttttcgcgctgctgaaactgggcgttgcgccggtgctggcgttgttcagccatcagcgtagtgaactgaacgcctatgccagccagattgaacccgcattgctgattgccgatcgccaacatgcgctgtttagcggggatgatttcctcaatactttcgtcacagaacattcctccattcgcgtggtgcaactgctcaacgacagcggtgagcataacttgcaggatgcgattaaccatccggctgaggattttactgccacgccatcacctgctgatgaagtggcctatttccagctttccggtggcaccaccggcacaccgaaactgatcccgcgcactcataacgactactactacagcgtgcgtcgtagcgtcgagatttgtcagttcacacaacagacacgctacctgtgcgcgatcccggcggctcataactacgccatgagttcgccaggatcgctgggcgtctttcttgccggaggaacggttgttctggcggccgatcccagcgccacgctctgtttcccattgattgaaaaacatcaggttaacgttaccgcgctggtgccacccgcagtcagcctgtggttgcaggcgctgatcgaaggcgaaagccgggcgcagcttgcctcgctgaaactgttacaggtcggcggcgcacgtctttctgccacccttgcggcgcgtattcccgctgagattggctgtcagttgcagcaggtgtttggcatggcggaagggctggtgaactacacccgacttgatgatagcgcggagaaaattatccatacccagggttacccaatgtgtccggatgacgaagtatgggttgccgatgccgaaggaaatccactgccgcaaggggaagtcggacgcctgatgacgcgcgggccgtacaccttccgcggctattacaaaagtccacagcacaatgccagcgcctttgatgccaacggtttttactgttccggcgatctgatctctattgatccagagggttacatcaccgtgcaggggcgcgagaaagatcagattaaccgtggcggcgagaagatcgctgccgaagagatcgaaaacctgctgctgcgccacccggcggtgatctacgccgcactggtgagcatggaagatgagctgatgggcgaaaaaagctgcgcttatctggtggtaaaagagccgctgcgcgcggtgcaggtgcgtcgtttcctgcgtgaacagggtattgccgaatttaaattaccggatcgcgtggagtgtgtggattcacttccgctgacggcggtcgggaaagtcgataaaaaacaattacgtcagtggctggcgtcacgcgcatcagcctgaaggagagaacacgatggctattccaaaattacaggcttacgcactgccggagtctcacgatattccgcagaataaagttgactgggcctttgaaccgcaacgtgccgcgttgttaatccatgatatgcaggactattttgtcagcttctggggcgagaactgcccgatgatggagcaggtgatcgcgaatattgctgcgctgcgcgactactgcaaacagcacaatatcccggtttattacaccgcccagccgaaagagcagagcgatgaagatcgggcgctgttgaatgatatgtgggggccgggcctgacccgctcgccggaacagcaaaaggtggtggatcgcctgacgccagatgccgacgacacggtgctggtgaagtggcgctacagcgcgtttcatcgttctccgctggagcaaatgctgaaagagagtggacgtaaccagctgattattaccggggtatatgcccacattggctgtatgaccaccgcaaccgacgcatttatgcgcgatattaaaccgtttatggtggcggatgcgctggccgatttcagccgtgacgagcatttgatgtcgctgaaatatgtggccggacgttctggccgggtggtgatgactgaagaattactgccagcacctatccccgccagcaaagcggcgctgcgtgaggtgatcctgccgttgctggacgagtccgatgaaccgttcgatgacgacaacctgatcgactacggtctggattcggtgcgcatgatggcgctggcggcgcgctggcgcaaagtgcatggtgatatcgactttgtcatgctggcgaaaaacccgaccatcgacgcctggtggaagctactctcccgcgaggtgaaataatgaatttcagcggtaaaaatgtctgggtaaccggcgcaggtaaaggtatcggctacgccacggcgctggcgtttgttgaggcgggagcgaaagttacaggttttgatcaagcgttcactcaggagcaatatccctttgcgaccgaagtgatggatgttgccgacgctgcgcaggtcgcgcaagtgtgtcagcgactgttagctgaaacggagcgactggacgcgctggtcaatgcggcgggaattttacgcatgggcgcgaccgatcagctcagtaaagaggactggcagcagacttttgcggttaacgtcggcggtgcgtttaacctgttccagcaaaccatgaaccagtttcgccgtcagcggggcggggcgattgtcactgtggcgtccgacgccgcgcacacgccgcgtattggcatgagtgcttatggcgcatcgaaagcggcgctgaaaagcctggcgttgagcgtcgggctggaactggcgggtagcggcgtgcgctgtaatgtggtttcgcctggctccaccgacaccgatatgcaacgcacgctgtgggtgagcgatgacgccgaagaacagcgtattcgcggctttggcgagcagtttaaactcggcattccgctggggaaaatcgcccgtccacaagagatcgccaacacgattttgttcctcgcctctgacctcgccagccatattaccctacaggatattgtggtcgatggcggctcaacgctgggggcataagcatgatctggaaacgccatttaacgctcgacgaactgaacgccaccagcgataacacaatggtggcgcatctgggaattgtgtatacccgtctgggcgatgatgtgctggaagccgaaatgccggttgatacccgtactcatcagccgttcggtttactacatggcggcgcgtcggcggcgctggcggaaacgctgggatcgatggccggatttatgatgacccgcgacggacagtgtgtggtaggcacagaacttaatgcaacacaccatcgcccggtgtctgagggaaaggtacgcggcgtctgccagccgctgcatcttggtcggcaaaatcagagctgggaaatcgtcgttttcgatgaacaggggcggcgttgctgcacttgtcggctgggtacggcagttttgggatgaacccgacagaattagatgagattgcaggaaaactcggttaacggagtgatcgagttaacattgttaagttaaatattggtttcaactccgatttacatggttgctgtgttgttaaattgtacaaagatgttatagaaacaaaatgtaacatctctatggacacgcacacggataacaactatgaacaaatcagggaaatacctcgtctggacagtgctctctgtaatgggagcatttgctctgggatacattgctttaaatcgtggggaacagatcaacgcgctgtggattgtggtggcgtcggtctgtatctatctgatcgcttaccgtttttatgggctgtatatcgccaaaaatgtgctggcggttgacccgacgcgtatgacgccagcggtgcgccataacgacgggctggactatgtgccgacggacaagaaagtgctgttcggtcaccattttgcggccattgccggagcaggtccgctggtggggccggtactggcggcgcaaatgggctacctgccggggatgatctggctgctcgctggggtggttctcgccggtgcggtgcaggatttcatggtgctgtttgtttctacgcgccgtgacggtcgctcgctgggtgagctggtcaaagaagagatggggccaaccgccggggtgattgcgctggtggcctgctttatgatcatggtcattatccttgcagtgctggcgatgatcgtggtgaaagccctgactcatagcccgtggggaacatataccgttgcgttcaccattccgctggcgctgtttatggggatctacctgcgctatctgcgtccggggcgtattggcgaagtgtcggtcatcggtctggtattcctgattttcgccattatctctggcggctgggtggcagaaagtccgacctgggcaccgtactttgactttaccggcgtgcagttgacctggatgctggtgggttacggttttgtggcggcggtgctgccggtgtggttactgctggccccgcgtgactacctctctaccttcctgaaaatcgggactatcgtcggtctggcggtaggcattttgattatgcgcccgacgctgaccatgcctgcgctgaccaaatttgtcgatggcactggcccggtatggaccggtaacctgttcccgttcctgtttatcaccatcgcctgtggcgcggtgtctggcttccatgcgctgatctcttctgggaccacgccgaagatgctggcgaacgaagggcaggcgtgctttatcggctacggtgggatgttaatggaatccttcgtggcgattatggcgctggtttccgcctgtatcatcgatccgggcgtgtattttgccatgaacagcccgatggcggtgctggctccggcagggacggcggatgtggtcgcttctgccgcgcaggtggtgagtagctggggctttagcattacaccagatacgctaaaccagattgccagcgaagtgggtgaacagtcgatcatttcccgtgcgggcggtgcgccgacgctggcggtggggatggcctacattctgcacggcgcgctgggcggcatgatggatgtggcgttctggtatcacttcgccattttgtttgaagcactgtttattctgacggcggtggatgcaggtacgcgtgctgcgcgctttatgttgcaggatctgctgggcgtggtgtctcctggcctgaagcggaccgattcactgcctgctaacctgctggcaacagcgctgtgcgtactggcgtggggctacttcctccatcagggcgtggtcgatccgctgggcggcattaacactctgtggccgctgtttggtattgccaaccagatgctggcagggatggcgctgatgctctgtgccgtggtgttgttcaagatgaaacgtcaacgttacgcctgggtggcgctggtaccaacggcctggctgctgatttgtaccctgaccgcaggctggcagaaagcgtttagcccggatgcgaaagtcggcttcctggccattgctaataagttccaggcaatgatcgacagcggcaatattccgtcgcagtatactgagtcacagctggcgcaactggtgttcaacaaccgtctggatgccgggttaaccatcttctttatggtggtcgtggtggttctggcactgttctcgattaagacggcacttgcggcattgaaagatccgaagccaacggcgaaagaaacgccgtatgaaccaatgccggaaaatgtcgaggagatcgtggcgcaggcaaaaggcgcacactaaagtcagagtgagggggggatgttggcgaatgttggcttagtgcccagggttccctctcaccctaaccctctccccggtggggcgaggggactgaccgagcgcgttgatagcatttgtaggccggataaggcgttcacgccgcatccggcactctttcagcaacatggttagcggaggccaagatgtttgattcactggcaaaagccggaaaatatttaggtcaggcggcgaagctgatgattggtatgcctgattacgacaactatgtcgaacatatgcgggttaaccatcccgatcaaacgccgatgacctacgaagagtttttccgtgagcggcaggacgcgcgctacggtggaaaaggcggcgcgcgctgctgctaaatttgtacgtcaggctttaaacgattccacttttttgaacgctgcacgcaacgtatctggtgtcagcgtgactggcaggtaatgaatggactccaccggacgcagggtgtgggcaatcactttgtcgatctccgcctgattattgatatccacttccagctccgccagtgtagtcggcagatgaaaacgctgatacgctccagttaattgcgccagcacatcatcctgacccagcaaggcgctttgcaccagaattccgtaggcgactttggtgccgtggagaaacttctcggtttgcggcagcacggtcagaccgttatgcacggcatgagctgccgccacacgcgtaaaacgatcgcccagaccaccaaccatcccaccaccagcaataatagcatccaccacatcgcaaaatgattgcgttaactgttgattttgctgatcgctcagcgcctgttcgctactgtttaacaagacgtcgcgaatggcttgcgcattattgatccccagtcgcacggttagcggcaacgtttctggttgcggagccagcaccaccgcttcataccatttcgccagcgtgtcaccgatccccgccagcagatattgttgcggtgcattgaggataatctccggttccaccagcaccataaaattggcgtcgtcgaaaatctcataatgcagcgcctgtccggcatcattataccagacggagagcggtgtccaggcggcgcaggtggcggcgatcgtcggaacggcaacaaacggcagaccgagacggcgggcgagggctttcgcggtgtcgagcagtgcaccgccaccgacgccaatcaccacgctgcggtcgtcaccggactcagccgccagttgttgtacatcgctttcgctgcaatgaccgcgaaacaaaatatgctttgcccctggcagtccaaacgctggcggaagtttggtttgcgccgcagcaatggcgcgtttgccgtagatccacaccgcgcgagaaagttgttcatcagtgaaaaaatcgtgcaggtgattgaaacttcctggatgtgaaaagtagttagccgggccgacgaccacgcggataggattgtgaggcatgttgtgttgtccttattgttttatttagacatctaaacgtcttgattgccaaatactagcatcgtgttatagtgccttcaacacgcaacttcgtcaggtacaataaaaatgacaaataaccctctgattccacaaagcaaacttccacaacttggcaccactattttcacccagatgagcgcgctggcgcagcaacaccaggcgattaacctgtcgcaaggctttcctgattttgatggtccgcgctatttacaggagcggctggcgcaccacgttgcacagggggcaaaccaatacgcgcccatgaccggcgtgcaggccttgcgcgaggcgattgctcagaaaacggaacgtttgtatggctatcaaccagatgccgatagcgatatcaccgtaacggcaggggcgacggaagcgttatacgcggcgattaccgcactggtgcgcaatggcgatgaagtgatttgttttgatcccagctatgacagttacgcccccgccatcgcgctttctgggggaatagtgaagcgtatggcactgcaaccaccgcattttcgcgttgactggcaggaatttgccgcattattaagcgagcgcaccagactggtgatcctcaacactccgcataaccccagtgcaactgtctggcagcaggctgatttcgccgctttgtggcaggcgatcgccgggcacgagatttttgtcattagcgatgaagtctacgagcacatcaacttttcacaacagggccatgccagtgtgctggcgcatccgcagctgcgtgagcgggcagtggcggtttcttcatttggcaagacctatcatatgaccggctggaaagtgggttattgtgttgcgccagcgcccatcagcgccgaaattcgcaaggtacatcagtatctgaccttttcggtgaataccccggcacagctggcgcttgctgatatgctacgtgcagaacctgagcattatcttgcgttaccggacttttatcgccagaagcgcgatattctggtgaatgctttaaatgaaagccggctggagattttaccgtgtgaaggtacatactttttgctggtggattacagcgcggtttctaccctggatgatgttgagttttgccagtggctgacgcaggagcacggcgtagcggcgattccgctgtcggtgttttgcgccgatcccttcccacataaactgattcgtctctgttttgccaagaaggaatcgacgttgctggcagcagctgaacgcctgcgccagctttagctatttaaccgtccaggcgcgggaatattgacggtcggcaaacaactcttgcaggccgttaatttgcttcaggcgcagcacttcgtcgctgtccattcccagctctttgccaattttattatcgtcccatcccaactggctaagttcacggacgatttccgacatggcggtgatttgatggcgtccacgagcgcgattatgacgaatagtcgcggcgatgcgttgattacgcgtaccttccagacaggtcaccggcaaataaccttttaagcgtaattttaacgatgatgagcctttaccaatttcatggcggtgaaaaccatccacgatttccagggcatttttatccgtatgcgtgaccacaatgggttgggtaaaaccatctatttcaatggattttttcagcagttttttttcgggtggtgccacgttgtttgggttgtaatcattcggcacaagctgatcatttttgacccacaaaacacaatctaccggttcttcccgaaaaggacttacctgatggatcgccatgcggatttcattaatcgctttgatgcgatcgtcttccggcaagctggcgagaaattgcgttaaatcctgcgttaatcgttgttgcatagtatcccccattcctgacgttttccttttatccgttcgttataacgctgatagttcttcgattttgtggggctaaatgataatgcccgacaccagtaatcgttattgagtaaaactttgcatatccgccgccaggaggggatatctttcgcgccaatgtccccttgctgggtttgtggaacctcgatgccttttttctgataccagtgcaaataaatggcgattttattgcggtaatgctcagctgttttttccggcatgctattgagcagcaataatgcatattcttgccagtctaaatgttctggcttgaggattttccgatgcccatagaaatgattgtcatgtccggcgtaaatgccgccactttttaccccgctgactcgtgcgcacatagcagcccagcgatccggttcgataacgtgatagagccataatccttgtcgttgctccgggccaaaaggttcgcaaattcgcatatgacgcagaggaacgcctgcctgatacattaggttatacagtgggttgcagagactttgatgatttgcataccaggtccagatatcagccactttccagtcgtaaatggggtaaatgtaccagctatgaccgcctggtgcggccgtagtccagggtttatcgtcggcaaaacgttgtttatttaaactggcgatggcgacaaaacggttgtaggactcatccgcacggatgccgatcatcatcgccgccggacgtttttgtgaaaaccattcggcaaactcacgtacaaattgttcgaaggtcatgcctggctggtaaaaggagaaaaagtcagggtcggttatcgcatcttggggaggttgacgtacccattcgacatcaggttcccagcactgccattcgggttggtattgtgaaagggaattttgcgtcgtaagcgggagcgcaacccagtaaaactcttcgatgacatcggtgtacaactcgcgcagggactgaacatagttaatggtgcaagagaattgcgcctcccagtcgataaacaaaacgcagatttttttgcccatttgtcgggcaagttcggctgtcagatgcagcattaaaccagagtctttgccgccagaaaatgagacacaaacgcggggtagggtgttgagtgtccaggtaatacgctctcgtgcagcttccagaatattgagcggaagaggaattttataaatagacatctgaagacgctctctgaacgttacagggtgatcagtgagataagtctgttaattataaagtaaacactgtaaagcagagtgttttatttttcattcgcgccgtgaataaataggtgaaagttatagtagctttctgaagttatatatcaaaaacactcatttaggcggtcaataaatcgtgagaataccagattgtttaaagaagatttattataggaaatgtaaggctttattgaaggtaacggatcttccagttttatctcttttaaattaagaaagtcacggtaggaattataaagttcataggggactattcccagtaaatctgtaactgcaatgctattaatgattgtcagcaaagaggaaccacgaaatgagattttgcgattcataaatctctcgtctatttccatttgaatatcatcaacccctgctgatttagatattaattgggtgaactcttctgccataatttgttcataagtgctattgtcagtaattcgtggatgcctattactacaaattagagtattgcgaatcgtatgcaatggcatgcaaatgacggaacggctgatcactggcatttgggtgatcaccagatcggctttgcggtgaaccaacagttcttcagcattctctgctgacatgaggatatcatggcactcaatctcgacagaggaatcttgccgtaggcagcggatcagcatactattattagagcaagaaatgagctgagggccgtagataataaagtttttctttagttcggacttattgactatattaattgtttgttcaaggcctctgagatttttctcaagatggtgatgcagatttaaccctgttgtcgtcggcgcgataccttttcctgagcgaatgaataaagggtcattaaattgcgcacgtaagcgttgtaacgactggctcacggctgatggggtgatatatagtgattcagcagctttgctaatgcttaaatgctggtaaatacactcaaatatgacaagaagatttaagtcgaactttttcaagtcgtagagattggccatacactactccggttatatttttcttccatgatatattcacttaatcaatgttttttgcgtatatatttttattgattatgtttttttgcttaactcaggattaagtttttctaaaatagcacagccacttagggcagagcgagcaattcatgcttttttaggatggttgaaaagcagggatatagttcaaccatccatgaattaccttttatttattccccataatgatattaagcgttttctgatcgggcaaccccacggcctgttgtagcgtattttccttactcatgtaatagatagccggcgtgacatttgcccccagatcgtccatcagtttctcattgtcacttaacactttcatttgctctgtacttacgtttgcaggcacgtttagcttaagcttgccaccagaggcttcatattgttgccaggtttttgcgggatctttggaggcaagaattgccgctgctgtcgccgggctttctggcttgataaccccaaccaacaatgttcttaattgcactttgccagaatctacccacgggcgcgcctgctgccagaactgtttacaatatgggcagaacggatcggcgaagacgtagacaatgaccggcgcatcttttttaccgtcgaggagccagtgggattgttccatccgttgccacatttcgcgtccggctggtgcgtaaatttctttttcgataagtgtgttactcaggttttcacctttctcgttgtacatgtaaccagagatagcgtgcttaccatctggagtcaggtagatggtgacgcccatatcctgatactttccgagataacctttcattcctccgggggcatcgaatgttttgatgattgtaatgccctgtttttcaatcgcttttactggagcaggaagttcctctgcgaaggcgattgcaggaagcagagccagtaaaagtatcttttttaacattaatttgtccttttcagtcagtgcaaaagtcgagtaaaaggcataacctatcactgtcataggtaagagcttagatcaggtgattgccctttgtttatgagggtgttgtaatccatgtcgttgttgcatttgtaagggcaacacctcagcctgcaggcaggcactgaagataccaaagggtagttcagattacacggtcacctggaaagggggccattttactttttatcgccgctggcggtgcaaagttcacaaagttgtcttacgaaggttgtaaggtaaaacttatcgatttgataatggaaacgcattagccgaatcggcaaaaattggttaccttacatctcatcgaaaacacggaggaagtattgatgtccttgattaacaccaaaattaaaccttttaaaaaccaggcattcaaaaacggcgaattcatcgaaatcaccgaaaaagataccgaaggccgctggagcgtcttcttcttctacccggctgactttactttcgtatgcccgaccgaactgggtgacgttgctgaccactacgaagaactgcagaaactgggcgtagacgtatacgcagtatctaccgatactcacttcacccacaaagcatggcacagcagctctgaaaccatcgctaaaatcaaatatgcgatgatcggcgacccgactggcgccctgacccgtaacttcgacaacatgcgtgaagatgaaggtctggctgaccgtgcgaccttcgttgttgacccgcagggtatcatccaggcaatcgaagttaccgctgaaggcattggccgtgacgcgtctgacctgctgcgtaaaatcaaagcagcacagtacgtagcttctcacccaggtgaagtttgcccggctaaatggaaagaaggtgaagcaactctggctccgtctctggacctggttggtaaaatctaaatttccttcgtctttcacgccatagcggcgttggcgtcgcccgctcaccccggtcacttacttgtgtaagctcccggggattcacaggctagccgccttgctctgacgcgaaatacttcggaaattcacctaattcttcgggtgctgcggcacccgattttcttccccgcaccatgatgcaagctgcatccaggtagccgcagaggccgcttgcatgatgatgtttaaagcccaggagataaacatgctcgacacaaatatgaaaactcaactcaaggcttaccttgagaaattgaccaagcctgttgagttaattgccacgctggatgacagcgctaaatcggcagaaatcaaggaactgttggctgaaatcgcagaactgtcagacaaagtcacctttaaagaagataacagcttgccggtgcgtaagccgtctttcctgatcaccaacccaggttccaaccaggggccacgttttgcaggctccccgctgggccacgagttcacctcgctggtactggcgttgctgtggaccggtggtcatccgtcgaaagaagcgcagtctctgctggagcagattcgccatattgacggtgattttgaattcgaaacctattactcgctctcttgccacaactgcccggacgtggtgcaggcgctgaacctgatgagcgtactgaacccgcgcatcaagcacactgcaattgacggcggcaccttccagaacgaaatcaccgatcgcaacgtgatgggcgttccggcagtgttcgtaaacgggaaagagtttggtcagggccgcatgacgttgactgaaatcgttgccaaaattgatactggcgcggaaaaacgtgcggcagaagagctgaacaagcgtgatgcttatgacgtattaatcgtcggttccggcccggcgggtgcagcggcagcaatttactccgcacgtaaaggcatccgtaccggtctgatgggcgaacgttttggtggtcagatcctcgataccgttgatatcgaaaactacatttctgtaccgaagactgaagggcagaagctggcaggcgcactgaaagttcacgttgatgaatacgacgttgatgtgatcgacagccagagcgccagcaaactgatcccagcagcagttgaaggtggtctgcatcagattgaaacagcttctggcgcggtactgaaagcacgcagcattatcgtggcgaccggtgcaaaatggcgcaacatgaacgttccgggcgaagatcagtatcgcaccaaaggcgtgacctactgcccgcactgcgacggcccgctgtttaaaggtaaacgcgtagcggttatcggcggcggtaactccggcgtggaagcggcaattgacctggcgggtatcgttgagcacgtaacgctgctggaatttgcgccagaaatgaaagccgaccaggttctgcaggacaaactgcgcagcctgaaaaacgtcgacattattctgaatgcgcaaaccacggaagtgaaaggcgacggcagcaaagtcgttggtctggaatatcgagatcgtgtcagcggcgatattcacaacatcgaactggccggtattttcgtccagattggtctgctgccgaacaccaactggctcgaaggcgcagtcgaacgtaaccgcatgggcgagattatcattgatgcgaaatgcgaaaccaacgtgaaaggcgtgttcgcagcgggtgactgtacgacggttccgtacaagcagatcatcatcgccactggcgaaggtgccaaagcctctctgagtgcttttgactacctgattcgcaccaaaactgcataagaagaagtaagattcacctgcaattgcttagccgccggggtcaaacctggcggcttttttatggcattaaaaagccccgccgggatggctccgggcagggcgggatacttattctggcaattaacgcacaaccagcaccggcagattggcgtggcggatcacgctcgaggcgttagaacctaacagatgggtcgaaatcgatgggttgcgagaaccaataactacaacatcagcccccagttcttctgccaactcattgacttcatcccgcacgctaccaaaacggacatgttgtttaatgcgggaaggatcgatggtgaagtggctgaccatcgtttgcagacgttcttgtgcttcatgttgcagatgctcttcaaaacgacgcacatcagcggcaaaacggtgcaggctcaggctggctgacccgggtagtacgtgaagtagatgaataactccgtcatcctgggcgaggaattcagcgtggcgaacagctttgtcgctcaattccatttcaaatacatcaactggcataatgattgtcttatacataaccctttctccctgttaatcatgaacaaatcattcgccatgattataatatttatccctgatatttgtctggttctttttccttacgaactgtttctgtgatgaatatattctcactgaacaccaggaattctcccaaaacctgtggtaccgcccgttttcccgctgtgatagctacccttaaagactgactcttttttgaactgtctctggaggttgcatgaaagcattgacttatcacggcccacatcacgttcaggtagaaaatgttcccgatccgggcgttgaacaggcagatgatattattctgcgtattacggcaacggcgatctgtggctctgacctccatctttatcgaggcaaaatacctcaggttaaacatggcgatatttttggtcatgaatttatgggggaagtagttgaaaccggaaaggacgtaaaaaatttgcaaaaaggcgaccgagtggtaattccgttcgtcattgcttgtggcgactgttttttctgtcgattgcaacaatatgccgcctgcgaaaataccaatgcgggtaaaggcgctgcgctcaataaaaaacagataccagctccagcggcattgtttggttatagtcacctgtatggcggcgttcctggtgggcaggcggaatatgtccgcgtccctaaagggaatgtggggccgtttaaagtaccgcctttgctttcagatgataaagcgcttttcctttctgatattctgccaacggcatggcaggcagcaaaaaatgcgcagatccaacaaggttcaagcgttgcagtctatggtgctggtcctgtgggattgttgacaatcgcctgtgcacggttgctcggtgcggaacagatttttgttgttgatcatcatccctaccgcttgcatttcgccgccgaccgctacggcgcgatcccgattaattttgatgaagacagcgatccggcacagtcaattattgaacaaacggcaggtcaccggggcgtggatgcagtaatagacgccgtcggttttgaagcgaaaggcagcaccacggaaacggtgctgactaacctgaaactggagggcagcagcggtaaagcgttgcgtcagtgtattgcggcggtcaggcgtggcggcattgttagcgtaccgggcgtctacgctggatttattcacggtttcctgtttggcgacgcctttgataaagggttgtcgtttaaaatgggacagacccacgttcacgcatggctgggagaattattaccgttaattgagaaaggattactgaaaccagaagaaattgttacccactatatgccgtttgaagaggccgcccggggatatgagattttcgaaaaacgtgaagaggagtgccgtaaggtgattctggtacccggtgcacaaagcgcagaggcggcgcagaaggcggtttcaggtctggtgaatgcgatgccggggggaacaatatgatcgtcaggagtggttttcgaggtaaaggacagccatgacgataatcgccgccataatcagaaatcctatcaggatgtaaaatgcttctgccatggttattcccacaaacgaaacggaataattttgcagcaaaagtgaacagtgagaaccaggaaaaattgctgattttgcgtaaagaggatgcgagtgcatcctctgggcaaagcgagttatcgcttgtgcagatgggattaaagcaggtagtcgccagcagcttctggctggtattcgagttccagcacttcaaggtgggttgcaacgccgcccggaagttcccagtgaatggaatcgccaacgcgcagccccagcagtgcggcacctaccggagccataacggaaagctgagtattgctatcggtcatttttgccggatacaccagcgtgcgcacacgcacttcgccatcgctaagattgcggaatttaacccggctgttcattgtcaccacgtcgtgtggcatctcttctggcgaacacatttgggcgcgatccaactctgcgtttaacgcgtcggcgattggcaaaccagcataggcgggttgctccagcagaatatcgatgcgttcggcatccaggtcgttaatgatgatagttggtctggacatttttactccatgtcgtcggtgctgcgagtgtcgcagataaacatacccaaaagaaaaccctcaccgtcaggcggcgagggtttaactcacatgatgatactgactgttgctcactctttgaagtgatttgcgtcacattcagggaattcctcaatgcagcgcattatgtataaatcttaatcgccttggtttatggaagacgaattagcgtgttttgtaaatcagatgattaataacccgctttatcaatcacaaaggttttgccacagttacctgggtgaggttgtggcaagaatgagtttgcagaaagcggagcgttgatggcgtcagctttgatcgagatctgaatttcagtcaaatacgcagggttaccctggcacgttagcttaactgctttcacgttctcttttccccagcttttggcaaaggcggcgtcaaagtcacggcggctcactgttttaccgtaattattcgcaaggaattttccggcttcgctctctttaatttcttgattcaggcgtaccatcgtaccgaagtatgcgtccggatcaaaaccaaagcaggcaccgtgtttggcatattcgtagcgttccaggcaggaacgtccgccagctcctggcatgacttcacttagtttagcggccgtttccagtgataatccggtttccggcgatgaacacattcggctggcgcgcgcttctggtagattcgggattgggcgagtagcgcaaccgaagcgcatccagcggcgttcatcaacaccacgggcagcaaccgatttaggcaatcctggccacagaccatgtacggtcagaaaatcagctttgttggtcgtttcggtttgcaggcgacattcatctcgttcgttacgatttcgatcgtgttgactctggcaaaatccggtttgccaggagagggccaggacatagcgatcaaaatcgccatactgttttgcctgcaacgctaaggcgttggcagaagagaagggaagcagagaaaccgcgagcaacgcggcgttacgccagaatgctttcataatgggtgtggaactcatacatacactgaatactatctattaaatcataaaaaagcccgccaggtgggcttacctggcgggcgtgatgatttattcagcgtttggcgaacgtattagttccacatggcgagaatcggccagccaaccaacagcaacatagagatgtaaatcaccccgaagattgcgccaagacgccagtaatcttttgatttcacatagccacagccgtaaataatcaccccaggaccggttgcatacggcgtcagacagcccatgataccgatagacagcaccagcaggatacacagttgttccattggtacgcccggaatacctttaccgacggccagaataaccggcagcatggttgcggtgtgcgcagacaggctggcaaacaggtagtgtgcaaagtagaacaccagaaccagtacaatcaccgttgcgtttggtgagaatccttccaggtgcgtactcatggtaccggcgaaccagtcaataaaaccagaacgagtcaggccgttagccatcacaaccagagttgccaggttgaccagtgtgttccatgcgctgttatagcgggtaatgtctttccaaggcacaacgtgcagggccagcattagcgaaactgccagcagaccaaccgcagtagcattaatgacttcactgccaaatacccacaaacctaagctgagcaatacaaggccaatcagtgtccactctctgcgtgtcagcgcacccatggttttcagttcatcacccgcccaggttgccacttcttcactgtgtgtgatttccggtttgtacagcacgtaggaaagccacggcgcaatgataagcaagataaccccaaccggcaggaagcagaggaaccactgcaaccagctaatctggataccggcaattttgctgacgaactccagacccagcacgtttggtgccgcaccggtgacaaacatggacgaactcagactggtactaatgaccatcatccacatcaaatagccgccaatacgacgcgcggacggatcgttcgggaatgatttaaacaacggcggcaggtttttaatgaccggaaaaaccgtacccccggtacgcgcggtgttggaaggtgtaaacggtgccagcagaatgtcgataatgacaatcgcataacccaacgtcagcgtgcgtttgcccatgaatttcaccaggaaaagggcaatgcgacgacctaacccggaaacttcataccctaatgcaaaaataaatgcgccaaataccagccataccgtggtgctggaaaaaccagccaggccccatttcagcgcctgtttttgcgcattaaacgctgggtcagctaattctttggcatcaaagagcaggtaattactgccaataacgcaaatagtaaccgcaataaaactgatcgctgttgccggaattggctcgaggatcatgccgacaatcattgccacaaacacagcgaagtaatgccatgcctgcggcggcataccgtcggggacagggataagaaacatgacacccatcaccaccagtggggccaatagtttccatatattatcttttgctaaagacatacgggttctccgaaaattaatatttccaaatttatcaagtgcttaaataattaaatctgtgctaaaaaccaggtaaggatcagtaggtcagcactgccgcctggactgagatttcgttcgatacactccctgtcgaactgccggagataatcgagatcggcgggggttcgaatgccccctttttgcaataatgtttgcgcctcgcgctgtagccagcgcaggcccccctcgccaccgcgcgatgcaacgttggtatcgccgttgatcgccatcagtaggagcaaggtatcgagcaatgccagttcaggatctaacccctgatccagcagagtgaggtaatgcggcaaggcgtgattgatcaccagtggataacccgcttcggcttcaccgcgtgcgccggtaaggccaagctgttggtacaaccgttgacctgccgtcagttgtgaattattggtacgcagttcgcgatcggtcaggccacggcagaaacttgccgccgtagaacaaacggttgttggcgttaccggttggttgagttgaagcaaacggccaattgccgcacatagcagccctaaagaaaaaatgctgcctttatgcgtgtttacgcccgcagtggcgcggaacatatcaccttcgcaagccataccaattgggcgtaatccgtggagtaccgcttctggtgccatttccgcactacaggcaccaaattcaatgaaacggggtagccagccctgaatcgccagcgcgctgcggtggaaatcttccagcgccatatctttgtgcgcaccgcagttaatgcgatccacgaggcctggtttcggtgacagattgacttcagtcagcatggcgcgccagcccagcagggcgtactcatcgattaatgacgtcgcaagctttgtggttttagttgacgttgcaggcatcgacatcgttcagcagtgcctccatgcggttgagtaaatcggtcagttgatgggtttttccacgcgcgcagacggctgcgctttgctcgcacaacaggcagcggcgaggcggcagtgaatagtcgcggcgggagagaatttcgccttcgggcgtcaggacatcgatatcccataaccgcccgagaggatggctatgttcaagctcaatggtggcgagcttgaggtcgcgagccggggcggcaatgctcaacatgccctccggcccgctggcggaaaccagtgcagcctgctcctgaatttgccagccctgttttgcggctaaggcacgcaaggctgtcacgccatgattaaaaattcggcgtgtgacctcgctgtctttaatcggcccaggcgcaaccacggtaaaggagaccagtggaacaggatggcgcttgagccagacgtgttgccgtgcttgcctttcatcccggctgacgagcagctcgggaattgataccgcatggtggctggcgagttcaggaagcaggtgcatggcttattccttcacctgatgcacaacatcgatcaccgagccatcgcggtaacgcacaacggcaacgacgcggtctgtgaattcaatcggctgtggttcaccggtcagcagacgcgcacgttcgcgcagccactcaatggaaaccactttaatgcccgcttcctgcagacgttctgccagttccggacgtgccgggttaactgcgataccgtggtctgtgaccagaatatcgacactggagcctggggtgatgcaggtcagtacgttatccaccagagtcggaatacgaccgcgtaccagcggcgcgacgatgatggaaagcgcagaggcaatcgcggtatcgcagtgaccaccggaagcaccacgcagtacgccgtcagagccggtcagcacgttaacgttgaactgggtgtcaatttccagcgcgctcagtaccaccacgtcgagacgatcaaccgatgcgcctttcgaaccccagttagcgtactggttggcgctgatttcgatgtgattggggttacgggccagcgattgcgcagcatggctgtcaaagctctgcacatccagcagtttgcggatcagacctttttcgtgcaggtcaaccatcgtcgcggtaataccgccaagggcgaagtcggcgcgaatatcgcggctacgcattttgtcttccaggaaacgggttaccgccagcgatgcgccgccggtgccggtttgcatggagaaaccttctttgaagtagccagagttgacaatcacatccgcagcgctacgggcaataagcagttcgcgcgggttagtggtcatacgggtcgcgccagcgccgatttttgcagcatcgccaacgcggtcaactttgacgatcaaatcaacctgatcttgctcaatgcttgccggattatgcggataaggcagcagttcttcggtaagcatcacgacctgttttgcgttgtcggcatcaaccattgcatagccgagggagccgcagcaggctttaccggtgtagccgttggcattaccgaattcatcacaggacgggacgccgaggaaagccacgtcgatattcagttcgccgctctgtaccagatgcacacgaccgccgtgagagtggatctgcaccggttctgccagcagaccacgggagatctcttccgccagtggaccacgcaggccggaggtataaatgcgggtaaccacgccctggcgaatgtgttctaccagcggcgcatggcaatcactcagggagctggacgccagggtcaggtttttaaagcccatcttcgcgatgacgtccatcaccatattgacggtcaggtcaccgccacggaaagcgtgatggaaggaaaccgtcatgccgtcctgtaaaccagagcgacgaatcgcttcttccaggttggcgcacagtttgcgatcgcgcgctttttcagcctggtaggtttgctttggtgagttctggaaagcggcaagatcgcattcagcgcgacgattccaggccgctacccgttcttgtcgttgagattgttcaattttctgcgtcattttgattgccttattcttcgcggatgccggaaagttctgcacgggagagcaccagacgggcgcgatcgataaccggaccgtccaccatcttgccgttcagggaaaccacgccgaggccttcgcgagcggcggcttcagcggcttctacgacgcggcgggcgtgatccacttctttctgggtcggtgcgtagaggttgtgcagcagatcaatctgacgcgggttgatcagcgatttgccgtcaaagcccagctgtttgatgtgggcggcttcttgcaggaatccagcttcgttgttagcgtcggaatagacggtatcgaacgcctgaatacccgcagagcgcgcggcctgcaaaatggagcagcgagcgaacagcagttcagttccttccggggagcgttctgtacgcaggttgcgcacatagtcttctgcaccgagggcgataccgatcaaacgctcggaagcgtgagcgatttccactgcgcgggtaatgcccagcggagattcaatcgccgccagcaggccggtgctgccgggttcacgaccacaggctttttcgatacgcaggatctctttttcgatatccagaacatcctgagcggtatcggttttcggcagacgcacaacgtccgcaccaccgcgaacgacggcttccaggtcgttgacaccccattcggaatccagcgcgttgacacgcacaatggtttcaatatcgcgatacagcggatgttgcagcgcgtggtaaaccatgcggcgggcggtgtctttttcacgcaatgctacggagtcttcgaggtcaaacatcagggcatcagccgggtagatgaaggagttgctgaccatcgcggcattggcaccaggcacaaacaacatgctgcggcgggtgcgagttttacgttgttgcagcgaagcggaaatcattggcaatcctcccatggcagagccgggataccgctggcgcgtgccagcagggcttccagtcgtgcacgtaaaatgcagtccagtgcgcctttgtcatcgacattcagctgtacgccgcgcacgttgtagcgggcgagaacgtccagaatggtggtgcgaattgcatcgccaaactgtttctcaacgctgctattgatttgcaggtcgatatcctgcgtatcgagtggggcgatgcgtatcatcacatccccagactcaagggtgcctgcaacggcgggctggtttattttcatttttcacctgtttctcatgcgggggtcttttgacgagctgccgcgtcctggcgggagtgctcaagcaggttctgcaaataatgcagcgtgactgcagggaccagcggcgcgatagccgtgagatcgttttttgccagcagttgacgtacccgggaagcggatatcggcatctcctggtaacgcagccgctcaatttcaaccagttcgatgggcggtgcggagatagtcggcgtttccagccagtagcgcatatcctggttgtactgggcggtaacgcgacaaaagggttcagtaccgacaaagcggtgagttacacccagcgcgggagcgaggtactgacggaaaatcttcagatcaatttcggtgtaacaatggttaatgacgctctgttctttaatgaagtagcaagggaacgtagcgcgggagatgatgtattcggagccgcgatgcacagtcaggcgtggaatatcggcggtgccttttaacaccagatccagccggtcttcataggggaagcgtgaagaatcttctttgactaaaaacagatgcaaccagtcgcactgtgccgcagcctgttgaatcagataacggtgaccattcgtaaagggattggcgttcatcacaatgcagccaatcttgttccctggatgacgaaattttttcagcgattcggcatagcgtttcagtcgcgtggcgctgttttccatcagcaccatcacgccgggtacgctggtcagcgtggaaaaaccgcactggcggaacagcgcctcgtattcggttttggtataaataaacagatgcgtgctgtgccgctcataggcgaggtttatcaattcagtggctaatgtcagcgccagtccttcaccgcgaacggattcactgatagcaacgcatttaataatatttccggcaattccaccgcacgcgataagcttttcatcgcgggttacggtaataaatacttcgactgtggtgtcaacgctcaaatcattttcatgcaggaattgggcgatttctgccatttttttattttctgaacgttttacgcgggtgaaaatatcattgccgaacataataaatagtatcctgaaggtgcatgttgttatcgatttgcaacgaatgttgttcaatgttgcaaattgataaccttttattttcacttgggagaaaggggggcgatcgaggtatatctttttctcctttcgctatacatcctaaggagtattgcagcgtgaaattttgatttatttcacatagagttagtggttttttatttatttaatggttttaagttttttaattaatgtaattacgaaatgactcgcaggtttaagtgatttaattgatttaatgaataaaatttgccacgatcataattaatatctatgtattttgattcaacattttaattacatccgtcaaagaggctcgggacaacccgcaaggaaaacaatgttgcagcttaacgagaataaacagtttgcatttttccaaagactggcatttccgctgcgtatctttttgctgattctggtgttctcaatatttgtcattgcagccctggcgcaatattttacggccagttttgaggactatttaacgcttcatgtacgcgacatggcaatgaatcaggcgaaaattattgcctccaatgacagtgtcatctctgcggtgaaaacgcgtgactacaaacggctggcgaccatcgctaacaaattacaaagagataccgattttgattatgtggtgattggggaccggcactcgatccgcctttaccatcctaatccggagaaaattggttatcctatgcagttcaccaaacagggcgcgctggagaaaggggagagctacttcattaccgggaaagggtcaatggggatggcgatgcgcgccaaaacgccaatctttgatgacgatggaaaagtcatcggcgtggtgtcgattggctacctggtgagtaaaatcgatagctggcgggctgagtttttattaccgatggcaggtgtgtttgtcgtgctgttagggattctgatgttgctgtcgtggttcctggccgcgcatatccgtcggcagatgatgggcatggagccaaagcaaatcgcacgcgtggtccgtcagcaagaggcgctgtttagttcggtttatgaagggctgattgcggtggatccgcatggttacattaccgccatcaatcgtaacgcaagaaagatgctggggctgagttcccccggacggcaatggttgggtaaacccattgttgaagtggtcaggcccgccgatttctttaccgaacagattgatgaaaaacgtcaggatgtggtggcgaactttaacggtctgagcgttattgccaaccgggaagctattcgttcaggtgatgatttgctgggggccattatcagctttcgtagtaaagacgaaatttccaccctcaatgcgcaactgacgcaaataaaacaatacgttgagagccttcgtacattgcgacacgagcatctcaattggatgtcgacgctcaatggtctgttgcagatgaaagagtatgatcgcgtgctggcgatggtgcagggggagtctcaggcccagcaacagcttattgacagcctgcgcgaggcgtttgccgatcgccaggtggcggggctgctttttggtaaagtgcagcgcgcccgggaactggggctaaaaatgatcattgtccccggtagccagctttcgcaactgccgccaggactggatagcaccgagtttgcagccattgtgggcaatttacttgataacgccttcgaagccagcctgcgtagcgatgaaggaaacaagatcgttgaattattcctcagcgatgaaggcgatgatgtggtgattgaagtcgccgatcagggctgcggcgttccagagtctctacgagacaaaatatttgagcagggggtcagtacgcgtgctgacgagcccggtgaacatggcattgggttgtacttgattgccagctacgtaacgcgctgcggtggtgttatcactctcgaagataatgatccctgcggtaccttattttcaatctatattccgaaagtgaaacctaatgacagctccattaaccctattgatcgttgaggacgaaacgccgctggcagagatgcatgcggaatatattcgtcacattcccggattcagtcagatattactggcgggaaatctggcgcaggcccgaatgatgatcgagcgttttaagccggggctaatcttgctcgataactatcttcctgacggtagagggattaatttactgcatgaactggtgcaggcgcattatcccggcgacgtggtgtttaccactgcagccagcgatatggaaacggtgtctgaagccgtacgttgtggtgtatttgattatctcattaagcccattgcctatgaacggctggggcaaacgctaacccgtttccgccagcgtaaacatatgctggaaagtattgatagcgccagccagaagcaaattgatgagatgtttaatgcttatgctcgcggtgaacctaaggacgagctaccgaccggcattgaccccttgacgctaaacgcggtgcgaaaactgtttaaagagcctggtgtgcaacatacggcagaaacggtggcgcaggcactgaccatcagccgcaccactgccaggcgttatcttgaatattgcgccagccgccatctgattattgctgaaattgttcacggcaaagttggcagaccacaacgcatataccacagtgggtgacatgataaagccggaggaaacttgcctccggcattactatttacttgcctgtgaccgctgctgccgttcctggcaccatcagctctgtagcaacgataacaatcaccaaaccaacaagcaccggtaccgaggtgcgttttacgacttcaaacggcgagatcttcgccatcccggcaaccgcaacgactacgccagaaacgggcgaaagggtacggccaaggtttgacgcctgcagcatcgggatagtcaaatacgccgggttaatgccggaagagtgcgccagtttcgggatcatctcaacaaacgcataaaacggcgcattgcctgaaccggtcgtgactgccgccagcattgtcagaatcaccaataccagcatcaggatgatactcgccgaaccaaacgaggtagcgatagaaatcagactttgaataaagccgatggtgctaagcccctgagcgaataccccagcggcaaccagcagcatcaccacgttagcaaacgcatctgccatcccgcgataagccacttccagaccagagaaaactttctgggtattaaagctgcggaggaactccagaatggaggcaatcagcatacaaatcaccagaatagtgatgatgtgtaattgcggaccccatttaccgtcaaaaatcagtacaccgatgatcggcgtgaacggcaaaatggcataaaacgcaggagcagtggtggtgatttcactgacatctaacatttcatgagagatgtgctcttttttatccagataacgttgccagaagaagtgggcgatcgccatgccgataattgcagcaattgagataggcagcgtcgttttgaaggcgaagtcaatcagcgacatttcggaagcttgcgccgccagcaccacatcccctgaagtcggtgcgagaataatcgccgccggggaggcacaaatggcagcagctgcgccacgactgataccaacgtttaccatcaccggaaatagggttgccatcagcaaaacacccagaccggttgcggaagagacggccagagacatcagacaggcgacaaaataggcggcaatcatcagcaggtaaggggagttaatatactgcaatggttttgacgccagcttgaccaccatatcattcgcgccgatatgggtcatgtaagcggcaaatccacacagcatcataatcatcatgccgaggtcgccgccgcggctcattagtaatattttaacgtattcaacgatatccgtggcgctgtagcctgttgaagcctggctggacggtaacactttgtgccccataatggcactgataatcagcaataacaggccaccgacaaataacacaccagtggcggaataccctttaatgatgtagcgagctacacccacaataaccacaaccccaataaggagctcaatgaatgtcagcataatttttcctgtctccaggccccaaagtaaataataaaaaattcctaaagcttaaggaaaaaatatgcccaataaattggcgatgaatgctgattaaaatcaagaaaaactgccattaagacattgaagttgctgtttttatacatagataacaaaacgcatatttagcggttggcaattatcacataataatgtgtgcaaattgatggtggattgatgcaaatttgttaattgcaatggtgttagctgcggctgtgcgctcaaaaaataatctaatatgagcataggttgacgatatatattatatacttcgttaagatgattgttgtatctcgttaaaaaataaaataatttttccttgattgcattttgtcatcaaaaaagacttggtttttcttttttgactattcccatcgcagaaaacgacgcatcatctttaatcgatgcgcggaaatatttaacttgaacaagcggaaataaatagagcagctattcagattattctttatgttgggtctattaaggttatgttaattgtagctttgctatgctagtagtagatttttgataaatgttttatggtcacaaatgaacgtgagtaaatatgtcgctatcttttcctttgtttttattcagttaatcagcgttggtaaagtttttgctaacgcagatgagtggatgacaacgtttagagaaaatattgcacaaacctggcaacagcctgaacattatgatttatatattcctgccatcacctggcatgcacgtttcgcttacgacaaagaaaaaaccgatcgctataacgagcgaccgtggggtggcggttttggcctgtcgcgttgggatgaaaaaggaaactggcatggcctgtatgccatggcatttaaggactcgtggaacaaatgggaaccgattgccggatacggatgggaaagtacctggcgaccgctggcggatgaaaattttcatttaggtctgggattcaccgctggcgtaacggcacgcgataactggaattacatccctctcccggttctactgccattggcctccgtgggttatggcccagtgacttttcagatgacctacattccgggtacctacaacaatggcaatgtgtactttgcctggatgcgctttcagttttgagacaaatgaagttttagtaacttctttaaaatcaatagctaaaataagtaacatcaaaaataacgcgacttttatcactttttagtaaagttacactggacaaagcgtaccacaattggtgtactggtaaccgacacagcatttgtgtctatttttcatgtaaaggtaattttgatgtctaagattaaaggtaacgttaagtggtttaatgagtccaaaggattcggtttcattactccggaagacggcagcaaagacgtgttcgtacacttctctgcaatccagactaatggttttaaaactcttgctgaaggtcagcgcgtagagttcgaaatcactaacggtgccaaaggcccttctgctgcaaacgtaatcgctctgtaagatacgtcagcaagaattcaaaacccgcttaatcagcgggttttttttggtctttagtgtgcggttgaggccgaaaacagccagaatgccagtgcggtcatggcaaaagaccccagaaggttgacgaaaacgttcagtaatgcccagccaaagcggccctcttgtaacaaaaacaccacttctgccgaaaatgttgagaaggttgttagaccgccacaaaatccggtggtgattaatactttccacactggatcaatgttcgtcatcctgctgaaccatgcgaatcctattcctatgatgaatgccccaatcaggtttgctgtcagcgtccccaacggaatcgcctgatgcagtgggttaaatcgcatacttaacagccatctcgccacgcttcccgtaccaccgccaataaaaacagctaaaagaagttgtaacactgcaaaatcctgctatttgatttgtatgagtgataagtgtaacgccgaataatcgtcgttggcgaattttacgactctgacaggaggtggcaatgctggttgccgcaggacagtttgctgttacatctgtgtgggaaaagaacgctgagatttgtgcctcgttgatggcgcaggcggcggaaaacgacgtatcgctgtttgtcctgccggaagcattgctggcgcgcgatgatcatgatgcagatctatcggttaaatcagcacagctgctggaaggcgaattcctcggacgtttacggcgagaaagtaaacgtaacatgatgacgacaattctgacgattcatgttccttcaacgccggggcgcgcatggaatatgctggtggcacttcaggcaggaaacatcgtcgcccgttatgccaaactgcatctctatgatgcatttgccattcaggaatcacgccgtgttgatgctggtaatgaaatcgctccgttactggaggtggaagggatgaaggtcggtctgatgacctgttatgacttacgctttccagagctggcgctggcacaggcattacagggagctgaaatcctggtacttcctgccgcctgggttcgcgggccgctcaaagagcatcactggtcaacgttgcttgccgctcgtgcgctggataccacctgttatatggtggcggcgggggagtgcgggaacaaaaatatcggtcaaagccggattatagatccctttggcgtcaccattgcggcagcgtcagaaatgcctgcactcattatggcggaagtgacgcccgaacgtgtgcgtcaggtgcgcgcgcaactgcccgtcttaaacaaccgtcgctttgcgccgccgcaattattatgatgtttttttactcggcgcttgattcaccttgttacagattgctattgtgtgcgcgcgtcgaatgaccgttaatattctctggtttttaaggcgcgttctgttgccggttatatgtcaagaaggtatctatgggtgagattagtattaccaaactgctggtagttgcggcgctggtcgttctgctgtttgggactaagaagttacgtacgctgggcggagaccttggagcggccattaaagggttcaagaaggcgatgaatgatgacgatgctgcggcgaaaaaaggcgcagacgttgatcttcaggctgaaaagctctctcataaagagtgacgtggcgagcaggacgctccctcaatatcttgttcgatacaaaaaacccgcttcaaaaagcgggttttttatcagacagatgtaagtaattattacaggattacttaacttccatccctttcgcctgcaaatcggcgtggtaagaagagcggacaaacggaccgcatgcagcatgggtaaagcccatcgccagcgcttcggctttcatttcgtcgaactcatccgggctaacgtaacgttgaaccggcaggtgatggcggcttggctgcaaatattgccccagcgttaacatcgtcacaccatgacggcgcaggtcgcgcattacctcaataatttcttcattggtttcacccagtcccaccatcagaccagacttggtcgggatttccggatgcgcttctttaaagcgttccagcagcttcagcgaccagttgtaatctgcaccaggccgtacctgacggtaaatacgcggtacgttttccaggttatggttgaacacatctggtggcgttgcagtcagaatatccagagcacgatccatacgaccgcggaaatccggcaccagagtttcaattttgatttgcgggcttttttcccgaatggcagtaatgcaatccgcaaagtgctgggcaccgccatcgcgcaggtcatcacggtcaacggaggtgataaccacataacgcagcgccatatcggcaatggtctgcgccagtttcactggttcattggcatcaggagctaccgggcgaccgtgggcaacatcacagaacggacaacggcgggtacaaatagcgccgaggatcataaacgttgctgtgccgtggttgaagcattccgccaggttagggcaggaggcttcctcgcagacagaatgcaggccatttttgcgcattgcggctttgatgccctggatacgtgtagagtccgctggaagcttgattttcatccattccggcttgcgcagcagggcttcgcgctctgttgccacgtttttaaccgggataagggccatcttatcggcatcgcggtatttaacaccgcgttccatcacaatgggtttactcatagcgtgcgtgttccagttgcgaattacgaaggaaagcgtttcaattcaatagattgttgtaattatcaactatttttgaattaacgactggcagtatatcattgaaacggacctgaaagcagccaaagcggtcgcgaaaatgtaaaattgttgttggattgtgccattttatcgttctgcgctgtgatctggctgtaacaatactttttcaaaatgcattacggataacatctattactccgtgcaggatgggatcacgcaggctgaatttgttgtagtggatagagaaatctatttgctcctcatttaaggacggaaaaggcagtttttccagcggccagcagcggctaaacaggttataaaaacggctgggaataatcgctaacatgtcactgttggcaaccagtgcagcgattgtcaaaatgttgtagctggtgaaattgatttgccggtccggaaacatttcttgaactctctgccgcagaccgctgaaattttgctcttccggtaacagaagtacatgcgcagcgttgtcgatagtctctctgtcatcttctaaagagagtagtggatttccctcgcggcaaattaacaccatattgtcggtgaacagaacatgatgttgcaccgtacgattggtgcaaaacatgttatcgatgatgagatcggtttgaaactgactgagttggttttccgcgtcgctgatgggcgggttgcgcagtaaaagctgcggatagtgagttttaatcgcccgatagatgacaggaaggaccagtgctccgaccgagggagtggtcgcaatagttatcgttcgttgcttatcatagcttccttcgatatccagcgcgccaagaatggactcaaggccctgactgatatactcatgtagatgcatcgcaaatgcggtaggagtgacaccctggcctttgcgaataaacaatgggtcagggaatataacgcgcagtttctgaatagactgactgattgccgagggggtcagattaagcactttcgctgcattaacgatccctttatgtacatatacagcttcaaaaatagtcagaaggttaagatcaatatttcgtaaggttgtaaatatttgtggtttaccttctgacgactttctgcttaaacagggttcaatttgattattactatccacgcacttactccaattttattcatggaaaaataatatttaaaaaattacaataatcttatgtctaattggaacggaacgcttttgctcaccataatcaactatttcaataggttaatcaatggggtgagttacggagcaaggcgtggcaccgcatttctgcaagtgataaagaaaatatacaaacgcgaaggagatgtaaagcattagcagatattatgagtaatgacccagtgtaaattgggccattgatgtatggaattaagcggtaatatattcgaagtccggattgtttagtagcgctaaaatattttccagtaaacgtggagcaatattattagtcgtcgcttcgggtttccattgtgatattttagccatttccattccggcatacccacaaggattaatacgtaaaaatggtgaaagatccatattgacgtttaatgccagaccgtggaatgaacaaccgcgtcgaatacgtaaacccagtgagcaaattttcttttccccaacatagacacctggcgcgtcagcccgaggatgcgcttctatacccagttcagccagggtattcaccactgtttgctcaagcaaggtcaccagttcacgcacaccgagtttacggcgtttcaggttaagcaacacatacatcacctgttgccccggcccgtgataagtcacctgcccaccgcgatcgctctggatcaccggaatatcacccggcattaaaatgtgctccgcttttcctgcctgaccttgggtgaataccggatagtgctcgaccagccagatttcatcaagggtactatcatcgcgggtatcggtgaattcatgcatagcctgggagattggctcgtaaggctgaagaccgagctggcggacaagaattttatcctgatacaaaacggcatctccgtggagaatgagtaaaagtgggggaaaagtatatcacagcgaggagaggggagttacccgaccaggagccgggtaacggagaagcgagttacagaaccatgcggacaatatcgattttgcccagttcttcatacagtgtttcaacctgctcgatatgagtggcgttgatagtgatagataccgagtggtagttgcctttgctgcttggttttaccgttggggtgtagtcacctggcgcatggcgctgtaccacttcaaccacctgatcaaccagctcaggtaacgcctgccccataactttgtaagtaaaaggagtagggaattcaagcagttcgttaagtttggttttcatgtcagctccggcgtaacgtaattaaatagcaactcccgccagaaggcgggagttttttactgatgcttagtatatggggacggaaattacactttcaagtgtttaatttttaaccaaaccagtgatggaacattaatttaatgtaatcaatgattttgccgaagaagttaccttccgggatttcttgcaacacaaccagcgggcgttgctcgatcgttttgccatcaagctggaagttgatagttccgacgacctgattcttttgcagcggcgcatgcaattcactgctgttcagcacatagctggctttcagatctttcatgcgaccacgcggaatggtcaggtacacgtctttatcaacccctaacgaagcgcgatcagaatcaccaaaccaaaccggttcagaggcgaactctttacctactttcagtgggttaacggtttcaaagaaacggaagccccaggttagcagttttttactttcggcttcacggcctttaaaagtacgtccgcccattaccgcagaaatcaagcgcatctggccttcagtcgcagaagcaacaaggttgtaacctgctttgtcagtgtgtccggttttgatgccgtcgacattcaggctgttatcccataacaggccgttacggttcagctggcgaataccgttaaacgtaaattctttttctttatagatcgagtattcattcggtacgtcacggatcaatgcctggccgatcagcgccatatctcgcgcggagctgtactgaccatcagcatccagaccatgtaccgtctggaagtgggtatttttcaggcccagtgcgttaacgtagctgttcatcaagccaacaaaagcgtcctggctaccagcggcaaaatcggccatggcgacacaagcatcgttacccgattgcaggttaataccgcggatcagctgagaaaccggaacctgcatgcccggtttgaggaacatcagcgaagaacctttaaacaccgggttaccggtggcccatgcgtcgttgccgatagtgactaaatcagtttctttaaatttaccggctttcattgcctggccgataacgtaactggtcatcattttggtcaggctggcaggatcgcggcggacatctgcgttctgttcggcgagcactttgccggagttatagtcaatcaggatgtaggactccgcatcgatctgcggtacacccgggatcatagttttgatattcaggtcatcggcatgtgcagcagagataaaggctgtgcaaagagccgtggtgagcgccaggcgcttcatgatacgagcggaaaaaatggtattcatggtctgaactacgacatccgtgatggaattaaaaaagtgccctactatagcaaatgcactaccggcaggcatctgactttccgcgtgactttgttaacgtcatttacagaaattgacacatcagatgcctgctttacgctactgcgcggtagtaataaatgactgtaattgggcttcggtttgcaaacgttgctgcaaggtactggcttcggctttgctggcgaatgggccaagctggatccgccagaccgcgccattttgagttacgcgaccggggacgccgaacttctgtcccagttgctgttggtactgttgcgcacgagcctgatcgcttacggccccgacttgcaccataaagttgccgctggcgctttgcgagacggcttgcggtgtcaccattgcaggcgaggttgcaggcgttgtcgacggagctgtaacaacgggctgtggcgcaggcgtcggttcgctgccttccagtacaccaggcgctaaggtcgttggtgcgccgaggaaaccgctactggttaccggcgcgccggtcggatcttcgctttttagcgtcgaattactgaccggaagaatgtcaccctgcgggccagacactgaacttgttcccgcgccaccgcttaaatcgggaggtgcaggcagggcgtaagtctgtttggcgactgtggtacaagccataccaggaccagaaagcgaaccatcctgggcaacaataatcggatcgatacgaactttggtgttgtttgacgtgttaagacggtcagctgccgcgcgagaaagtgaaataacgcggtcgttgccgtaagggccgcgatcattaatgcgcaccacgatcattcgcccgttagccaggttagtgattctggcgtagctggggatcggaagcgttggatgggccgccgtcagctgtgtcggatcgaaagcttcgccagaggccgtcaggttactgccgggttcggcatcatagattgccgccagtcccgcctggctaaatcgagacggatcctgcacgattttgtagcttttaccgtcgcgctggtaatcctgatttgccgtcgcgttcagtggttcgaaacgcgggtccgccccgctaatttcaactatggggccgttacataccgcaggctgcggtacacttaccgtctgttgctgaccatcatcgcttgtacatgccgcgagcattcctgccgcgatgcagatcccgagccactgcttacgcattgcgcacctcttacacgcttttcgacaacattttcctgtgggtgtggattgacattacaatcccgaacccagccatcagcacaattagcgccgatcctccataactgaccagtgggagcggaacccctacaaccggcagaataccgcttaccataccaatatttacgaagacataaacgaataatatcagcattaagccaccagccatgacgcgaccaaaggtggtttgcgctctggcggctatccacagcccgcgcatgatcagcagaatgtagagagcgagcagaatcagaatgcccactaatcccagctcttccgccagtaccgcgaagataaagtcggtatggcgttcggggagaaattcaagctgtgactgagtgccgtgcagccagcctttgccgcgtaatccgccggagccaatagcaattttagactgaataatgtgatagcccgcgccgagtgggtctgattctgggtccaggagcatcattacgcgctggcgctggtaatcatgcatcaggaagaaccacagaatcggaatgaacgccgccaccagcactactgcgacgccaatcagacgccagctaaggccagagaggaacagtacaaacagaccggaaagcgcaacgaggattgatgttcccaggtcaggctgtgcagccaccagcagcgtgggcataaatatcagcaccagcgcgatgccagtgttcttcaacgatggcgggcaaacgtcgcggttgataaagcgcgcaaccatcagtggtacggctattttggcaatttccgacggctgaaaacgaacaataccgaggtccagccagcgttgagcacctttagagatggcaccgaaagcatctaccgccaccagcaaaataatacagatgatatagagatagggggcccagccttcataaacgcgtggaggaatttgcgccatcaccaccatgatgaccagacccatcgcgatttggccgattttacgctccatcatgccaatatcctgaccgctggcgctccagataaccagggcgctgtaaaccagcaatgccagtaagatcagcagcattgtgggatcgagatggactttatcccagaatgtttttttattcggattatccgtcatgattaatggtcctccgctgcggcaaccgctggattttccgcaggcagatcggtgttgttatcacccagcataatgtggtcgaggatctggcgcatcagtgtaccaaccgccggacccgcaccaccgttctccagaatcatggcgacagccacttgcggattgttgtatggcgcaaaggcggtcatcagtttgtggtcacgtaaacgctcggcaattttgtgcgcattataggtttcgttcgctttcagaccgaagacctgagcggtaccggatttcgccgcaattttgtacggtgcgctagcaaagtatttatgcgccgtaccgttagggcggttagcaacaccgtacataccgtctttcgccagctcccagtaaccggaatgaatatcgccgacgggcggttcatgcggctgtacccatggcacctgtttgccgtcttcggcggtgctcatcagcaaatgaggaaccttcacgataccgtcattaatcaggatcatcagtgccttactcatctggattggggtcgctgtccagtaaccctgaccgataccaaccggaatggtgtcaccctgataccacggttttttaaagcgtttctgtttccattcgcgggtaggcatgttgccggaacgttcttccgccaggtcgataccggtgtaatgaccataaccgaatttacccatccattcggagaggcgatcgatccccatatcgtaggccacctgatagaagaaggtatccgcagattcttccagcgatcttgtgacattcagacgcccgtggccccattttttccagtcacgataacgtttttccgaacctggcagttgccaccagcctgggtcaaacagcgtcgtattgcgcgtgatcaccccggcgctcaatgccgaaaccgccacatagggtttaactgtagacgcgggaggataaaccccctgtgtggcgcggttcaccagcggtgtattcgggtcgttcaacaaggcggaataatctttgctggagataccatcaacaaacaagtttgggtcataactaggcgtggaaaccagcgccagcaccccacctgtacgcggatcggtgacaaccacagctgcgcggctacccgccagcagcgtttcaatatattgctggagtttgagatccagcgtcaggtaaatatcgtgtccggcttgcggtggtacttcttttaactggcgaataacacgcccacggttgttaacttcaacctcttcataaccggtctgaccgtgcagcacatcttcatagtaacgctcaatgcccagcttaccgatatcatgcgttgccgcatagttggccagtttgccgtcattattcaggcgttcgacgtctttatcgttgattttcgacacatagccgatgacgtgggtcaacgccgaaccgtaaggatagtaacgacgtttatagcctttaacttcgacacccggaaaacggtactgattgacggcaaagcgagctacttgtacttcggtcaggttagttttcaccggaatagaggtgaaacggtgtgaacgtgcgcgctcttttcggaatgcagcaatatcgtcatcggtcagatctaccacgctgcgcaaagcgtccagcgtttgctgcacgttatcgactttctccggcatcatttctatctggtagatagtgcggttgagggccagagggataccgttacgatcgtagataatgccgcggctgggcgcgataggcaccagcttaatgcggttttcattagagcgggtctggtagtcggtaaagcgaacaatttgcagattatacaggttggcgataagcacgccggtcagcagcaaaatccccaaaaaggcgaccagcgcccggcgcacaaacagcgcggactctgccgtatagtcgcgaaaagagttctgtagtttcatccgctgcgttttctactcaaagctcccttatcactcacggtgataaggatggttggtggtgatgctccacgcccggtacagactctctgcgaccagcacgcgaaccagcggatgggggagggtaagcgccgacagcgaccagctctgctcagccgccgctttacaggcaggcgacaacccttcaggcccgccaatcagtagactgacgtcgcgaccatccagcttccagcgttccagctcagcggctaactgcggcgtatcccagggcttgcctggaatatcgagggtgacaatgcggtttttgcctgcggccgccaacatctgctcaccctctttgtcgagtatgcgcttgatgtccgcattcttgccgcgttttccggccggaatttcaatcagctcgaagggcatatctttcggaaaacgacgcaggtactcggtaaaaccggtttgtacccagtccggcattttcgttcccacggcgacaagttgcagcttcacgcattaactccagagtttttccagttcatacaggcgacggctctcttcctgcatgacatggacaatcacatcgcccaaatccacgacaatccagtcggcgctgttttcaccttctacgccgagcggtaacaggcccgctgcgcgagactcctgcacaacgtggtcagcaatggacataacatgacggctggacgtacccgtacagatgatcatgcagtcggtgatgctggatttgccctgaacgtctaaggcgatgatgtcctgacctttgaggtcatcaattttgtcgataacaaaatcctggagtgctttaccctgcaagttttccccctgggtgaatcaaatagataaaaatggtctgtcagtatacctgaaccagaggcgatttcgggacaattgtcgccgaatcggctttcgaaagtgggctatcatcccaccccgcgccgcagattgcatcgccatttttgtaaaacaatttctacaaagtcgtgtctggcggaaaaagtctggctgcggagaatatcagcctgcccggggctgtcaatggtcgttgcggcttacccgtaaaaaaacagaaaagtcatgcattctcgaccccgatggcacggctattgaggacgcgtagcgtcgcgaatttttggttgatatcaatggcgctccaacacccctggtcaacgcgaaaatgccacatagactcggcaggcatgccaattaaacgagcaattaacagactcagtacgccctgatggctgacgattaaaatattctgatagtgctgatattcactaagccttgcgataaagcgttccacacgttgcgaaaatgcctgaaatccttcaccgttcgtggggatagcatgctgccagtcattgcaccacgcgctatagttttcggcatcttcttgcatgaggtcgcgatgatgtcgcatctcccagtcgccaaaaaacatttcgttgagttcagggatgatatgaacggggagctggcggtcactgagaaccagtcgtgcggtatgctgtgcccgttccagttcactgcataaaaccaggtcaaaggaaacatcatctagcagtgtatgcagattttgcgcttgctcaataccgcgtgcggtcaggggtgtgggcgcatgaccgctgtacagaccatcgacattcgcttgtgtttcgccatgacgaattaaccacagtcgcatcatgccctccgtaacgacaggtatcagcgatacaagccttgttggttaatgtaagtcaataccggttccggcaataaatcctcacacgattcaccgttttgcaaacgttcgcggatgatggtcgccgagatgttaaaccacggcgtttcagccagataaattttaccggcaggctgaaggtgaagatcttccgggttatgtgtcaaatgatcttccagccattgctggtattgcggttgcgccatttcaagtgggtaacctggacgccgacagacgatcaaatgtgcattgtcgagtatcgtttcgtattcgtaccaggtcggaaaggtcagcaatgaatcctgaccaataataaacgccagcggcacgtccggtccttgttcctgccgccactctttcagtgtttgcgcagtgtaagagggggcattgcgctttagctcgcgttcatcaagagtaaataatggcttgtcggcaatcgccagttcaagcatgtgtttacgctgcacgctgttcgcttccggctggggacgatgcggaggaacattattagggatgattgtgacccgcgtcagaccaatcaaattcgccagcgtttccacgggttttagatgaccatagtgcaccggatcaaaggtgccgccaaacagagcctgtaaagatttcatatcaaccgtcgataaatacgtccgccaggggtttatggcacaacagaagagataacccttccagctctgcccacactgactgaccgtaatcttgtttgagggtgagttccgttcgtgtaaggagttgcacggcctgacgtaactgcggctgacttaagcgatttaacgcctcgcccatcatgccccggcggttctgccatacccgatgcttatcaaacaatgcacgcagtggcgtatgggcagactggcgtttcaggttaaccagtaacaacagttcacgttgtaatgtgcgcaacaaaataaccggctcgctgccttccagacgcagttgctgaagaatatgcaacgcgcgcttactttttcccatcaacaaagcatcaacccaatgaaaaggggtgaaatgcgcggcatcattcaccgcctgttcaacgcgcggtaatgtcagtttgccgtctggccagagcagcgataaacgctccagtgcctgagccagcgccagcaggttaccttcataacagtagcagagcacctgattcgccgcgtcatccagttctaagttgagctgttttgcgcgcgcagcaacccagcggggaagctgagcctgctccggtgtctgacaggtcacctgcacgctgcgattcgcaagagcagtaaaccaggcggcattttcttgcgctttgcttaatttattaccgcggacgatcaacagcaggtcgtcatgcagaagtccggtgagtgtgagaagttgttcattgatcgccccattcggtccgttttctggtaacaacagcaatagcgtttgtcgactggcaaacagactcatagcctggcataacgaaaagatcgcattccagtcagtgttgggatcaatggaaaaagtgtggtgttcttcgaatccttgtgccgcagctacctgacgaacagcgtcctggctttcctgcaataacagaggatcgttaccaagtaaaagatacgccgcgcgcagcccttcattgagctgtgcgcggagttgttccgggtacaaccgaatcatcagttacccagcgtggtggagacgcgtgcaggcgttgccggagtatccgttgtggtcgacgtctgttcttcgtcggaacgaatatccgcagcacggatgcttggcagcttacgaatcagctgttcggcagcacggtcgtacatctcttttacgatcatgtcttgttcgttatctttcgctaacgccatttgcgggttatcaaagaacgaacggaagactttggcgctaatcgggtagatatcacggccggggatcaacacggtcgcattcaccgtcatgatcatctgatactctgctgtttgaccgttacggaataccgatgcggtatctttcgcgatgctcactttacccaaacgcagggatggaacgtccttacgcgtggtttctttatcaagcaactcgacaccattcagacgtaactggttacgcaccgcacggcttaatggcccgttcggatcgcctgagtccaggatcatgaccttcatagtggaaggaacctgcgtggtatcacgcagatgccagccacacccggcggtgattaacaccgccagagataacaacaatgttgccagatatcgcacgcttcctcccgcgcttagccaacgaccagattgaggagtttacctggtacgtaaatcactttacgtacagtaacgccatcaagatattttgctaccagatgttcctggccagcacgttcgcgaacctgttcttccgttgcgtccaccggaacggtgattttggcacggactttaccgttaacctgcaccacgaccagcgtggagtcttccaccatcgctttttcgtcagcaaccggccacggcgcgttgtcgatatcgccttcgcctttcagttcctgccacagcgtgaagcagatgtgcggggtgaacgggttaagcatacggacaacggccagcagcgcttcctgcatcagagcgcgatcctgctcgccatcggttggtgctttcgccagtttgttcatcagctccataatcgccgcaattgcggtgttgaaggtctgacgacggccgatatcatcggtcactttagcgatagttttatgcacatcgcgacgcagcgctttctgatcttcagtcagcgcatcaacgttcagtgccgcaacatcaccttttgctgtgtgctcgtaaaccagtttccagacacgtttcaggaagcggttagccccttccacaccggattcctgccattcgagagtcatatcagccggagaagcaaacatcataaacagacgaacggtgtccgcgccgtaacgttcaaccatcacctgcgggtcgataccgttgttcttcgacttggacattttgctcatgccggtataaaccagttcatggcctgccgcatctttcgctttcacgatacggcctttctcgtcacgttcaacgatagcatcaaccggggaaacccagttacgttcgccgttttcgccaacatagtagaaggcatctgccagcaccataccctgacacagcaactgtttcgctggttcgtcagagttcaccatgcctgcatcacgcatcagtttgtggaagaagcggaagtagagcaggtgcataatggcgtgttcaataccaccaatgtagatatccaccggcagccagtagttagccgcttcggaatccagcataccttctttgtactgcgggcaagtgtagcgcgcatagtaccaggaggactccataaaggtgtcgaaagtgtcggtttcacgcagtgctggcataccgttaacggtagttttcgcccactccggatctgctttaatcgggctggtaatgccgtccattaccacatcttccggcaggatcaccggcagctggtcgtccggggtcggcattacggtaccgtcttccagcgtcaccatcggaatcggcgcgccccagtaacgctgacgggaaacaccccagtcgcgcaggcggtagttcactttacgctcgccaacgcccatcgcagtcagtttatcggcgatggcgttgaaggccgcttcatggtcaagaccgttgaactcgccagagttgaacagcacgcctttttcagtcagggcttgctgagaaagatctggctcagagccgtcagctgccaggataaccggtttgatgttcaggccgtatttagaggcaaactcgtagtcgcgctggtcgtgccccggtaccgccataactgcgcccgtgccgtactccatcaatacgaagtttgctgcccaaacgggaatttcttcgcccgttaatgggtgaaccgctttaaagccagtatcgacgccttttttctccatcgtcgccatttcagcttcggcaactttggtgttacggcattcgtcaataaaggccgccagttcaggattattttccgccgctttctgcgccagcggatgacccgcagctaccgccaggtaggtacaacccataaaggtgtccgggcgggtagtgtaaacggtcagcgtgttgtcatagtcgttaacgttgaaggtgatctccacgccttcggaacgaccgatccagttacgctgcatggttttaacggtgtctggccagtgatccagtttatccagatcgttgagcagctcgtcagcgtaagcagtgattttgataaaccactgcgggatctctttacgttcaactttggtatcgcagcgccagcagcagccgtcgataacttgttcgttcgccagtacggtctggtcgttcgggcaccagttgaccgcagaagtcttcttatataccaggccttttttatacagctcggtgaagaatttctgttcccaacggtagtattccggcgtacaggttgccagctcgcggctccagtcataaccaaagcccagcattttgagctggtttttcatatacgcgatgttgtcgtacgtccacggtgccggagcggtgttgtttttcaccgccgcgccttccgcaggcagaccaaacgcgtcccagccgatcggctgcaggacgtttttgcccagcatacgctggtagcgggcgatcacgtcaccgatggtgtagttacgtacgtggcccatgtgtagtcgaccagaaggatagggaagcatagacaggcagtaatacttctctttgctctcgtcttcggttacttcaaatgtgcgcttctcatcccaatgaagctgtactttggattctatctcttccgggcggtattgctcttgcatggcagccagtggtcctgttttcaatacggctacaaatgtagcgttgaggtggtttttcagatccgcatagcatagcccaaacgtccgcgtcaaaacagcctttcgcgcactcgacgttgaaatgatgcccggattattcatacattaatttacagagtttgtgggcgtattagcaaagcaaggaacaaagaacgtctattattatagtcagttaacgacccgggagatgaaacgatgaacaaggttgctcaatattaccgtgaactggttgcgtcactgagcgaacgcctgcgcaatggcgaacgtgatatcgacgcactggtggaacaggcgcgcgagcgcgtaataaaaacaggggagttaacgcgaaccgaggtcgatgagctgacgcgagctgtcagacgtgacctggaagagttcgccatgagctatgaagagagcctgaaagaagaatctgacagcgtctttatgcgggtgattaaagaaagcttgtggcaggagctggcagacatcaccgataaaacgcagcttgaatggcgcgaagttttccaggacctcaatcatcatggggtttatcacagcggagaagtggtcgggctgggaaatctggtctgcgagaaatgtcacttccatctcccgatctacacaccggaagtgctgacgctatgcccgaaatgtggtcatgaccagttccagagacgcccgtttgagccgtaatagtctgatttcgcacagcaataaagagaatatgggccgaatgaaattccccggcccttgtttttatctctacagtaaatcttcagtctcacgaatttcctgactgacatctctggttccggatgactgaactttacgatacaggtcgagagcctgtcggagatcgacaggtcttccttctccgtagtgatacataatggccaggttataccaggcagtggcgtcattgcattcagcggctttcgtaaaccattcaaaggcagcctgataatctttctcaacgccttgtccgtgtttatacatataaccgatgttgacgtaagcgccgacgctcccctgagcggcagccttcagataccagtacatcgcttgcttatagtcctggtccaccccttcgccagcgttataatcccatgcaatttgaaactgggcgtgccgattaccctgctgtgcgcttttcaaataccagaatgcggcgagtgtcttgttttgagcaacgccttttccgtcttcataaagatcggccagattgttttgcgcgtcactatggccttgtaatgcagcttgtttgtaccagaaaaatgccagcgcatagtcttttgcgactccgttgccatttctgtacatccacccaagattattttgcgcataagacattccgctctccgcggctatctgataccagacaaccgcttctttataatttggggcttctccacgatccagtgtccagccaagggcgttggaagcgaaagtatggccttgtagggcagcttttttcagccagaagatggcttgctcattatctttatgacggcttttatcctcggtatacttttgccctaaggaatactgtgcttcacaatgaccttgctcagcggccagcttcagccagtaaaaggctttttcgtcgtccggagaatcaattgcgctatcgcgattataataaaacccaacaatatattgagcctcgcaatcgcctttttcagcacgttcgataatctcatctattgataaattatcgcagcaacttgacgtgaaaatcattatcatttccttatggttgcagataaaacatattatatttttatgtgttccatttttgcgtaagccttattttatgcgtattatgtcgcgtcagaaaagtataaataaacgagcctcgcaatgcggctaatattcatttaatgaatatttaaggataaattatatggacatggagtcgcaaaaaatattgtttgcactttccactccgatggaaatacgcaatgaatgctgtttaccttcgcattcatcacccaaaatgtatttaggtacatgcttttttgacctttcttcctcatggggaattgatgaccgtgatgacctgctgcgcacaattcaccgaatgatcgataacggtcatgccgctcggttggcagggttttatcaccgctggtttcgttattcgccatgtgaatggcgtgactatcttgctgaactaaatgagcaaggtcaggcttatgcgcaatttgtcgccagcaccgccgaatgctgtggcgaagggggaatcaaagcctgggattatgtccggatgggttttttaagccgaatgggcgtacttaataactggttgagcgaagaagaaagtctatggatccagtcgcgcattcatctacgggctctacgttattatagtaactggcggcaatactttgccggttatacctttggtcggcaatattggcagtctcccgaagatgatcatctgcctttattacgcgaattcttagcgcgtaaagaatacgacgattccggcaatgatatgttttatcaattatttgccagtgatgatgcgtattaccctaccttgtcctggcaaccattggcttactattctgcatgcccggaaacgcttaaggatatgagcgacctatgaaaaattgctggaagatcctcgatatagaggaaacgactgacgtcgatattatccgccgcgcttatctggcgctgttaccgtcctttcatccagaaaccgatccgcagggttttaaacaacttcgtcaggcgtatgaggaggcgctacggattgcgcagtcgcctgctaaatctgtttggcaaccagaagaatatgaggtagcagaacatgaaattctgctcgcctttcgtgcgttacttgcctctgatagtgaacgttttctgccctccgcctggcagcgattcattcagcaattaaattattgctcgatggaggagattgatgaattacgctggtcgctgtgcacaatcgccatgaacactgcccatttatccttcgagtgcgtggtgttattagcagaaagattgcggtggttacaggaggaaaataccggggaaatagacgaagaagaactggaatcctttttatatgccattgcgaaggggaatgtttttaacttccagaccattctgcatctgcccgttgccgtgcaaaatgacaccatcgatttttaccaaatgttcgctcggatttggtcatcgcatccacaatggctgacattgtatttagcgcaacatcgcgcagtgattatccccgatgatgcaaaactgcacagaaatttactccgctggtatagcgcaggtcgcctggatatccggctctgtcgcattaagaagtcgtcagataacatgctgtttttttttgcgatgttgcgttgagctaaccggtactaatgaaccgtgaggcttaaccttacaacgccgaaggtgttttggcggattgagagaagattttcagcctgatacagattaaatcagaacgcagaagcggtctgataaaacagaatttgcctggcggcagtagcgcggtggtcccacctgaccccatgccgaactcagaagtgaaacgccgtagcgccgatggtagtgtggggtctccccatgcgagagtagggaactgccaggcatcaaattagaaaaaccccggtccataaggccggggttttttgcatatcaattatttgcatgatgaagggaatctcatgtcagttctgtatatccaaattcgtcgtaatcaaattactgttcgcgatcttgaaagcaaacgtgaagtgtcaggagacgctgccttcagtaaccagcgcctgttaatcgccaatttctttgttgcagaaaaagttctgcaagatcttgttctgcaactccacccacgttcaacctggcattcttttttgccagcaaaacgtatggatattgttgtgagcgcgctggaaatgaatgagggcggtttgtcacaggttgaggaacgcattctccatgaagtggtcgctggggcaacgttaatgaaatatcgccagttccacatccatgcgcaatcagcggtactcagtgatagtgcggtcatggcaatgcttaagcagaaataatcgtgtcaccattggtgggtactaaacctgaagttcagcccaccgggatgagaaaaaatcgcctacgcccccacatacgccagattcagcaacggatacggtttccccaaatcgtccacctcagagcgtcccgtaaccttaaaacccaccttcttatagaacccaaccgcctgctcattttgctcattaacgttggttgtcagttccggtgccatcgagagcgcatgctccaccagcacccgacctacgccgcagccgcgcacatcaggatcgataaacagcgcatccatatgctgcccacttagcaacataaatccaaccggctgatcccgctcattaaccgcgacccacaacggcgcttccggcaggaaggaacgaactaggtcctccagctcggtccgatactctgctgatagaaaatcgtgagtggcatcgacagaacgacaccaaatcgcaacgagttcctccccttcctcatgccgtgagcggcgaatactaataaccattttctctccttttagtcattcttatattctaacgtagtcttttccttgaaactttctcaccttcaacatgcaggctcgacattggcaaattttctggttatcttcagctatctagatgtctaaacgtataagcgtatgtagtgaggtaatcaggttatgccgattcgtgtgccggacgagctacccgccgtcaatttcttgcgtgaagaaaacgtctttgtgatgacaacttctcgtgcgtctggtcaggaaattcgtccacttaaggttctgatccttaacctgatgccgaagaagattgaaactgaaaatcagtttctgcgcctgctttcaaactcacctttgcaggtcgatattcagctgttgcgcatcgattcccgtgaatcgcgcaacacgcccgcagagcatctgaacaacttctactgtaactttgaagatattcaggatcagaactttgacggtttgattgtaactggtgcgccgctgggcctggtggagtttaatgatgtcgcttactggccgcagatcaaacaggtgctggagtggtcgaaagatcacgtcacctcgacgctgtttgtctgctgggcggtacaggccgcgctcaatatcctctacggcattcctaagcaaactcgcaccgacaaactctctggcgtttacgagcatcatattctccatcctcatgcgcttctgacgcgtggctttgatgattcattcctggcaccgcattcgcgctatgctgactttccggcagcgttgattcgtgattacaccgatctggaaattctggcagagacggaagaaggggatgcatatctgtttgccagtaaagataagcgcattgcctttgtgacgggccatcccgaatatgatgcgcaaacgctggcgcaggaatttttccgcgatgtggaagccggactagacccggatgtaccgtataactatttcccgcacaatgatccgcaaaatacaccgcgagcgagctggcgtagtcacggtaatttactgtttaccaactggctcaactattacgtctaccagatcacgccatacgatctacggcacatgaatccaacgctggattaatcttctgtgatagtcgatcgttaagcgattcagcaccttacctcaggcaccttcgggtgccttttttatttccgaaacgtacctcagcaggtgaataaattttattcatattgttatcaacaagttatcaagtatttttaattaaaatggaaattgtttttgattttgcattttaaatgagtagtcttagttgtgctgaacgaaaagagcacaacgatccttcgttcacagtggggaagttttcggatccatgacgaggagctgcacgatgactgaacaggcaacaacaaccgatgaactggctttcacaaggccgtatggcgagcaggagaagcaaattcttactgccgaagcggtagaatttctgactgagctggtgacgcattttacgccacaacgcaataaacttctggcagcgcgcattcagcagcagcaagatattgataacggaacgttgcctgattttatttcggaaacagcttccattcgcgatgctgattggaaaattcgcgggattcctgcggacttagaagaccgccgcgtagagataactggcccggtagagcgcaagatggtgatcaacgcgctcaacgccaatgtgaaagtctttatggccgatttcgaagattcactggcaccagactggaacaaagtgatcgacgggcaaattaacctgcgtgatgcggttaacggcaccatcagttacaccaatgaagcaggcaaaatttaccagctcaagcccaatccagcggttttgatttgtcgggtacgcggtctgcacttgccggaaaaacatgtcacctggcgtggtgaggcaatccccggcagcctgtttgattttgcgctctatttcttccacaactatcaggcactgttggcaaagggcagtggtccctatttctatctgccgaaaacccagtcctggcaggaagcggcctggtggagcgaagtcttcagctatgcagaagatcgctttaatctgccgcgcggcaccatcaaggcgacgttgctgattgaaacgctgcccgccgtgttccagatggatgaaatccttcacgcgctgcgtgaccatattgttggtctgaactgcggtcgttgggattacatcttcagctatatcaaaacgttgaaaaactatcccgatcgcgtcctgccagacagacaggcagtgacgatggataaaccattcctgaatgcttactcacgcctgttgattaaaacctgccataaacgcggtgcttttgcgatgggcggcatggcggcgtttattccgagcaaagatgaagagcacaataaccaggtgctcaacaaagtaaaagcggataaatcgctggaagccaataacggtcacgatggcacatggatcgctcacccaggccttgcggacacggcaatggcggtattcaacgacattctcggctcccgtaaaaatcagcttgaagtgatgcgcgaacaagacgcgccgattactgccgatcagctgctggcaccttgtgatggtgaacgcaccgaagaaggtatgcgcgccaacattcgcgtggctgtgcagtacatcgaagcgtggatctctggcaacggctgtgtgccgatttatggcctgatggaagatgcggcgacggctgaaatttcccgtacctcgatctggcagtggatccatcatcaaaaaacgttgagcaatggcaaaccggtgaccaaagccttgttccgccagatgctgggcgaagagatgaaagtcattgccagcgaactgggcgaagaacgtttctcccaggggcgttttgacgatgccgcacgcttgatggaacagatcaccacttccgatgagttaattgatttcctgaccctgccaggctaccgcctgttagcgtaaaccaccacataactatggagcatctgcacatgaaaacccgtacacaacaaattgaagaattacagaaagagtggactcaaccgcgttgggaaggcattactcgcccatacagtgcggaagatgtggtgaaattacgcggttcagtcaatcctgaatgcacgctggcgcaactgggcgcagcgaaaatgtggcgtctgctgcacggtgagtcgaaaaaaggctacatcaacagcctcggcgcactgactggcggtcaggcgctgcaacaggcgaaagcgggtattgaagcagtctatctgtcgggatggcaggtagcggcggacgctaacctggcggccagcatgtatccggatcagtcgctctatccggcaaactcggtgccagctgtggtggagcggatcaacaacaccttccgtcgtgccgatcagatccaatggtccgcgggcattgagccgggcgatccgcgctatgtcgattacttcctgccgatcgttgccgatgcggaagccggttttggcggtgtcctgaatgcctttgaactgatgaaagcgatgattgaagccggtgcagcggcagttcacttcgaagatcagctggcgtcagtgaagaaatgcggtcacatgggcggcaaagttttagtgccaactcaggaagctattcagaaactggtcgcggcgcgtctggcagctgacgtgacgggcgttccaaccctgctggttgcccgtaccgatgctgatgcggcggatctgatcacctccgattgcgacccgtatgacagcgaatttattaccggcgagcgtaccagtgaaggcttcttccgtactcatgcgggcattgagcaagcgatcagccgtggcctggcgtatgcgccatatgctgacctggtctggtgtgaaacctccacgccggatctggaactggcgcgtcgctttgcacaagctatccacgcgaaatatccgggcaaactgctggcttataactgctcgccgtcgttcaactggcagaaaaacctcgacgacaaaactattgccagcttccagcagcagctgtcggatatgggctacaagttccagttcatcaccctggcaggtatccacagcatgtggttcaacatgtttgacctggcaaacgcctatgcccagggcgagggtatgaagcactacgttgagaaagtgcagcagccggaatttgccgccgcgaaagatggctataccttcgtatctcaccagcaggaagtgggtacaggttacttcgataaagtgacgactattattcagggcggcacgtcttcagtcaccgcgctgaccggctccactgaagaatcgcagttctaagcaacaacaaccgttgctgactgtaggccggataaggcgttcacgccgcatccggcaatcggtgcacgatgcctgatgcgacgcttgcgcgtcttatcatgcctacaaccgttgccgaacgtaggctggataaggcgtttacgccgcatccggcaattctctgctcctgatgagggcgctaaatgccgcgtggcctggaattattgattgctcaaaccattttgcaaggcttcgatgctcagtatggtcgattcctcgaagtgacctccggtgcgcagcagcgtttcgaacaggccgactggcatgctgtccagcaggcgatgaaaaaccgtatccatctttacgatcatcacgttggtctggtcgtggagcaactgcgctgcattactaacggccaaagtacggacgcggcatttttactacgtgttaaagagcattacacccggctgttgccggattacccgcgcttcgagattgcggagagcttttttaactccgtgtactgtcggttatttgaccaccgctcgcttactcccgagcggctttttatctttagctctcagccagagcgccgctttcgtaccattccccgcccgctggcgaaagactttcaccccgatcacggctgggaatctctactgatgcgcgttatcagcgacctaccgctgcgcctgcgctggcagaataaaagccgtgacatccattacattattcgccatctgacggaaacgctggggacagacaacctcgcggaaagtcatttacaggtggcgaacgaactgttttaccgcaataaagccgcctggctggtaggcaaactgatcacaccttccggcacattgccatttttgctgccgatccaccagacggacgacggcgagttatttattgatacctgcctgacgacgaccgccgaagcgagcattgtttttggctttgcgcgttcttattttatggtttatgcgccgctgcccgcagcgctggtcgagtggctacgggaaattctgccaggtaaaaccaccgctgaattgtatatggctatcggctgccagaagcacgccaaaaccgaaagctaccgcgaatatctcgtttatctacagggctgtaatgagcagttcattgaagcgccgggtattcgtggaatggtgatgttggtgtttacgctgccgggctttgatcgggtattcaaagtcatcaaagacaggttcgcgccgcagaaagagatgtctgccgctcacgttcgtgcctgctatcaactggtgaaagagcacgatcgcgtgggccgaatggcggacacccaggagtttgaaaactttgtgctggagaagcggcatatttccccggcattaatggaattactgcttcaggaagcagcggaaaaaatcaccgatctcggcgaacaaattgtgattcgccatctttatattgagcggcggatggtgccgctcaatatctggctggaacaagtggaaggtcagcagttgcgcgacgccattgaagaatacggtaacgctattcgccagcttgccgctgctaacattttccctggcgacatgctgtttaaaaacttcggtgtcacccgtcacgggcgtgtggttttttatgattacgatgaaatttgctacatgacggaagtgaatttccgcgacatcccgccgccgcgctatccggaagacgaacttgccagcgaaccgtggtacagcgtctcgccgggcgatgttttcccggaagagtttcgccactggctatgcgccgacccgcgtattggtccgctgtttgaagagatgcacgccgacctgttccgcgctgattactggcgcgcactacaaaaccgcatacgtgaagggcatgtggaagatgtttatgcgtatcggcgcaggcaaagatttagcgtacggtatggggagatgcttttttgagtaaagcttccatataatttttctccgcaatgtatcgagggttatccgtaaagccaaagctttcagccatcttatttaatgtattaaggattaattcagcaataacccggtgaccaaattcaaaagccaactcaaaggcagagtatttttgtggggctttgtgttgccaaaaatccataatatcttcagcggtaaatccaaacaggcgtgcatggtcagataaagcaagataaaccgtctctacaacattttgttgtttatgctgtatcgctgaaaacaaaccgggatattcattagaattatttgccaggaggaggggcttcatattttttttatcgaatttaaacgtattaaacagagtgggtaatgcgttaaaaatagtattaataacgttcatatgtccgcgctgcatggccataaacaaacccgtgtcgcgcgcaagacttttagcggtcagaagatctacaatatcggaagctgaaatgttaatttcctgggctaggctgggcaatgcttcaagaataactttcacgatatcgctatgtccattttgcatcgccagatatagtcctgggcaaccataaaaatcctttgccttcaggagatcgagtacctgttctttagtcaaatgacatgtgcgaattaacaaaggtaacgcgttcaaaacaattttcagcatgtcggcatcaccattcgccataacatggtataaaacatggctggacgttctatttttggcactcaggaatttatacacttgttcgttatctaaatgatgtgttgcggccagtttaggtaaggcgttcagaatcgaggttacaacatttttatccttacgtgatatcgctaaaaataatccagaaaaaccatttttatcttttgcctccagaatatgcatgagattttttttcgagagtaatccttcatatcctgtttctgacaatgaattgaaaatagtctcaacgatatccgcattaccataatttatagccaaatataaacctggcaggttaatactattataggcagtcaacatttctgttctatgtagttctggcattttctggagttgaatcatcagttgcgtaagttggtgattctgaccaattgccattagcaaattcatcgttgcaggtgataatggaggggttatttcatccacagatccttttaacatcaatagctgttctttcggaagtgctggaattattgcaacagattgattaataacatgatcatttgaccatttcaggaggctataatctacattcataaaatccatcagagaatagtgtttaatattctctttgctttcgctcataattcttattttatcgttagttacattaggatcataaaccgaaaccacgtaatgggtacatccttcagttgtgttctttattcttagccggaccgtcaaagcatggttatccaccagtaatatggctgccataacactgatgccatttgattccatcttgtcaaaatatgctttcataactagcccgaaatcaccgcaggcagcaacgcaacgcccctcaggacggctggaaaccaacgccaaagtctggtttttgcattttttgttgaagtgcgtgagaaatttttcagctgaagagtaatcatcttgatggggtttgtaatcaacattctgataaatatcattaatatattgtgcagcaatgtgtcggcatactatacggttttggggtcgccccggaaaataacattgaccattaagtttaattcttgggaattctttttcttttctatctgattttaggtttaattcttgtttatcaagagtgtctgagcgttgaggtaaaatttccattaggtatttttcaaatattggggcaatggtttgagtaagtgtcgtgttttcgtttttattaattatcgtaatttctttcttatcagcttgtaagacggacgtggaaaatttaatgacaaaatccttgttgctaaagatatgacgaccattttgtctacagttctctgagaagctttttaatagaggcgtcgccagctccttgccagaaaatttatcctcgagttctttataaaacaattcactcagggtttggtgttcatttgtctgggctgtattattaatatttgcagagaaagaactacgaggaatacgagtaatcatttaaatatctcattgtttattgatgtcttgaattttaactatcagaacagtgaaaaaatttaatatgattacaactaaagaaatatcataaatcgctcaatctcataatgcagccgtaaaagtttcggtggaatgagatcttgcgattttgttaataattaagtggtttgatgtttaaaaataatgctgagttaataaaagtgtgtgaagtgtatgacattaagttattttggcgtcaatgcgattaacagacacccttattctattgccactcaggtatgatgggcagaatattgcctctgcccgccagaaaaagtcagcgcattccaccgtacgccagcgtcacttccttcgccgctttaatcaccatcgcgccaaactcggtcacgcggtcatcggtaatacgtgaaatcggtccggaaatagaaattgcggcaaacggttcacggtgctcatcgaaaatacacgctgcaaggcaacgtagccccagtgcatgttcctcatcgtcaaatgaataaccccgtttgcgcgtttgggcgagatcttcttttaaatgcacaggagacaccagcgttgcgtgggtataggcatgtaaccctttgcggtgcagcagcttcgtcacctgttcttcgctcagttgggctaaaaaggctttacccgcaccggaagcgtgcatcggcaatttaccgccgataggcgcggacattcgcatcagatgcgtacactgtacctggtcgataataatcgcttcgtgatcgctttgatcaagcaccgccatattgaccgtttcgccagactcttccattagattgcgcaggatagggtgaacaatcgctaacaaattacggctctggagaaagctgctgccgaccataaaggcatgtgcgccgattgcccaatgtcccagttcgccaacctgacgcacgaaaccctgctgttgcatcgtggttagcaggcggtgggtcgtggaattgggtaacccggcttgttgcgccagttccgtgagtgccacactgccattggattcggcaatccactccagtaatttcaggccacgcgttaaagactgaacctgtccagtcgctggtgcggtggcaacggcgggttttctgccgcgtttcgcgggaatgggtgcgaccatgacagtctcctttttctgtatcgtggaaatcattttcatttttatcgttagctaatgcaatagttactgaactgatccgatgagttaatgttgaacaaatctcatgttgcgtggtggtcgcttttaccacagatgcgtttatgccagtatggtttgttgaatttttattaaatctgggttgagcgtgtcgggagcaagtgtgagcagcaaagtggaacaactgcgtgcgcagttaaatgaacgtattctggtgctggacggcggtatgggcaccatgatccagagttatcgactgaacgaagccgattttcgtggtgaacgctttgccgactggccatgcgacctcaaaggcaacaacgacctgctggtactcagtaaaccggaagtgatcgccgctatccacaacgcctactttgaagcgggcgcggatatcatcgaaaccaacaccttcaactccacgaccattgcgatggcggattaccagatggaatccctgtcggcggaaatcaactttgcggcggcgaaactggcgcgagcttgtgctgacgagtggaccgcgcgcacgccagagaaaccgcgctacgttgccggtgttctcggcccgaccaaccgcacggcgtctatttctccggacgtcaacgatccggcatttcgtaatatcacttttgacgggctggtggcggcttatcgagagtccaccaaagcgctggtggaaggtggcgcggatctgatcctgattgaaaccgttttcgacacccttaacgccaaagcggcggtatttgcggtgaaaacggagtttgaagcgctgggcgttgagctgccgattatgatctccggcaccatcaccgacgcctccgggcgcacgctctccgggcagaccaccgaagcattttacaactcattgcgccacgccgaagctctgacctttggcctgaactgtgcgctggggcccgatgaactgcgccagtacgtgcaggagctgtcacggattgcggaatgctacgtcactgcgcacccgaacgccgggctacccaacgcctttggtgagtacgatctcgacgccgacacgatggcaaaacagatacgtgaatgggcgcaagcgggttttctcaatatcgtcggcggctgctgtggcaccacgccacaacatattgcagcgatgagtcgtgcagtagaaggattagcgccgcgcaaactgccggaaattcccgtagcctgccgtttgtccggcctggagccgctgaacattggcgaagatagcctgtttgtgaacgtgggtgaacgcaccaacgtcaccggttccgctaagttcaagcgcctgatcaaagaagagaaatacagcgaggcgctggatgtcgcgcgtcaacaggtggaaaacggcgcgcagattatcgatatcaacatggatgaagggatgctcgatgccgaagcggcgatggtgcgttttctcaatctgattgccggtgaaccggatatcgctcgcgtgccgattatgatcgactcctcaaaatgggacgtcattgaaaaaggtctgaagtgtatccagggcaaaggcattgttaactctatctcgatgaaagagggcgtcgatgcctttatccatcacgcgaaattgttgcgtcgctacggtgcggcagtggtggtaatggcctttgacgaacagggacaggccgatactcgcgcacggaaaatcgagatttgccgtcgggcgtacaaaatcctcaccgaagaggttggcttcccgccagaagatatcatcttcgacccaaacatcttcgcggtcgcaactggcattgaagagcacaacaactacgcgcaggactttatcggcgcgtgtgaagacatcaaacgcgaactgccgcacgcgctgatttccggcggcgtatctaacgtttctttctcgttccgtggcaacgatccggtgcgcgaagccattcacgcagtgttcctctactacgctattcgcaatggcatggatatggggatcgtcaacgccgggcaactggcgatttacgacgacctacccgctgaactgcgcgacgcggtggaagatgtgattcttaatcgtcgcgacgatggcaccgagcgtttactggagcttgccgagaaatatcgcggcagcaaaaccgacgacaccgccaacgcccagcaggcggagtggcgctcgtgggaagtgaataaacgtctggaatactcgctggtcaaaggcattaccgagtttatcgagcaggataccgaagaagcccgccagcaggctacgcgcccgattgaagtgattgaaggcccgttgatggacggcatgaatgtggtcggcgacctgtttggcgaagggaaaatgttcctgccacaggtggtcaaatcggcgcgcgtcatgaaacaggcggtggcctacctcgaaccgtttattgaagccagcaaagagcagggcaaaaccaacggcaagatggtgatcgccaccgtgaagggcgacgtccacgacatcggtaaaaatatcgttggtgtggtgctgcaatgtaacaactacgaaattgtcgatctcggcgttatggtgcctgcggaaaaaattctccgtaccgctaaagaagtgaatgctgatctgattggcctttcggggcttatcacgccgtcgctggacgagatggttaacgtggcgaaagagatggagcgtcagggcttcactattccgttactgattggcggcgcgacgacctcaaaagcgcacacggcggtgaaaatcgagcagaactacagcggcccgacggtgtatgtgcagaatgcctcgcgtaccgttggtgtggtggcggcgctgctttccgatacccagcgtgatgattttgtcgctcgtacccgcaaggagtacgaaaccgtacgtattcagcacgggcgcaagaaaccgcgcacaccaccggtcacgctggaagcggcgcgcgataacgatttcgcttttgactggcaggcttacacgccgccggtggcgcaccgtctcggcgtgcaggaagtcgaagccagcatcgaaacgctgcgtaattacatcgactggacaccgttctttatgacctggtcgctggccgggaagtatccgcgcattctggaagatgaagtggtgggcgttgaggcgcagcggctgtttaaagacgccaacgacatgctggataaattaagcgccgagaaaacgctgaatccgcgtggcgtggtgggcctgttcccggcaaaccgtgtgggcgatgacattgaaatctaccgtgacgaaacgcgtacccatgtgatcaacgtcagccaccatctgcgtcaacagaccgaaaaaacaggcttcgctaactactgtctcgctgacttcgttgcgccgaagctttctggtaaagcagattacatcggcgcatttgccgtgactggcgggctggaagaggacgcactggctgatgcctttgaagcgcagcacgatgattacaacaaaatcatggtgaaagcgcttgccgaccgtttagccgaagcctttgcggagtatctccatgagcgtgtgcgtaaagtctactggggctatgcgccgaacgagaacctcagcaacgaagagctgatccgcgaaaactaccagggcatccgtccggcaccgggctatccggcctgcccggaacatacggaaaaagccaccatctgggagctgctggaagtggaaaaacacactggcatgaaactcacagaatctttcgccatgtggcccggtgcatcggtttcgggttggtacttcagccacccggacagcaagtactacgctgtagcacaaattcagcgcgatcaggttgaagattatgcccgccgtaaaggtatgagcgttaccgaagttgagcgctggctggcaccgaatctggggtatgacgcggactgattcacaaatctgtcacttttccttacaacaaacagggcgctcaatgagtgccctgtctctttattaatatgaaacacttatactggaaacaggctggaataatcttagccggaaaaacgaatgtcaaaaggcacagtaaagatgccagtcagcgtgtttccggtcctttggtcattcaattgcttcaggaacatataacgataaggagaacctgaactcgtgttaacgctgcttcacctgctttctgccgtcgccctgctggtctgggggactcatattgttcgaaccggcgtaatgcgcgtcttcggcgcgcgtttgcgtactgtccttagccggagcgtcgaaaaaaagccgctcgccttttgcgcggggatcggcgttaccgcactggtacagagcagtaatgccaccaccatgctggtgacctcgtttgtcgctcaggatctggtagccctcgcaccggctctggtcattgtgctgggtgcagatgtcgggacggcgctaatggcgcgtattctcaccttcgacttatcctggctgtcaccgttacttatttttatcggcgtgatttttttcctcggacgcaaacagtcacgcgccgggcaactgggccgcgtcggtattggtcttgggctgattttgctagcgctggagttgattgtgcaggccgtaacgccgatcacccaggcaaacggcgttcaggtgatctttgcctcgctgaccggcgatattctgctggatgcgctgattggcgcgatgttcgccattatcagctactccagccttgctgctgtactgctgaccgcgactctgaccgccgcaggcattatctccttccccgtggcgctctgtctggtgattggtgctaacctcggttccggtctgctggcaatgctcaacaacagtgccgccaatgccgcagcccgccgtgtcgcgctgggtagtctgctgtttaagctggtgggtagcctgattatcctgccgtttgtccatttgctggcagagacaatggggaagttgtcattgccaaaagcggaactggtgatctatttccacgtcttctacaaccttgtacgttgcctggtcatgctgccatttgttgacccgatggcacggttttgcaaaacgattattcgcgatgaaccggaactggatacccagctacggcctaaacatctggatgtcagcgcgctggatacgcccacgcttgctctggcgaacgccgcgcgcgaaaccctgcgcattggcgacgccatggaacagatgatggaagggttgaataaagtgatgcacggtgagccacggcaggagaaagagctgcgtaagctggcagatgatatcaacgttctctacaccgccattaagctgtatctggcgcggatgccaaaagaagagctggcggaggaagagtcgcgccgctgggcagagatcatcgaaatgtcgctcaaccttgaacaggcctccgatatcgtcgagcgcatgggcagcgaaattgctgacaaatcactggcagcacggcgggcattttcgcttgatgggttgaaggaactggatgcgctctatgagcaattgctcagtaatttaaagctggcaatgtcggtgttcttctctggcgatgtcaccagcgctcgtcgtttgcgtcgcagcaaacatcgttttcgcattcttaatcgccgctattcccacgcccacgtcgatcgcctgcatcagcaaaacgtgcagagcattgaaaccagttcgctacatttaggcttactgggagatatgcagcgcctgaactcgctgttttgttcggtggcttacagtgtgctggaacagccggatgaagatgaaggacgggacgagtattaatattgtgaatcctgtaggcctgataagacgcgtcaagcgtcgcatcaggcactatgaacaagatgccggatcatgcatccggcaattcacttaaaaacggtgaccagcttccagcggaaccgcttcttcaccagccttaaacacataagtggtgttcgggccacccagcgtagcgtgacctttactcactgtgatccagttaccttccggtagaccaataatcgtcagttctggcgcgacgaccagcagttcgcgaatacgctgctcacgggtttcacctttatggccttccggcagcgcgttggtgaagtgcgggttgatttgcagcgggaacagatttagcgcatcgaaaccttgcggatcgacaatcggcatatcgttggtggtacgaatagttgggcaagcaaggttagcgcctgcgctccagccaatatacagagcgccacgtttaaccacgtcagtaattggtgccagcagcccgcgctcgcggcactgtttcagcaactggaaagtattcccgccgccgacaatcacgatctcagcattttcaatcgcggcaacgggatcgacaacgctatgaataccggtgacagaaacacccagcggagcgagaaccgcagccgttttcgctgtgtaatcatcccaggtctgcgttacgccagcgaaagggataaacaccgctgagcggcgaccctgcaactgttcagcaattagcggcagtgcatgttccagccaggctttacccggcagcgtcgagttactcaataaaagcagttccattacttctccggttagtaagaaatcacgggaggcatgctaccactgcgaatttaaccacttactgacatggctcacgatgtcgcacattgcttctggaaagtgatttgagcaggtaacgaattcaagccaatggaaataacaaatagttcgctcatgactattttttatcaacccaaaggtacggtatattccgttttttacaggagaatttatgctgcccgactcatcagtccgtttaaataaatacatcagcgaaagcggaatttgctcacgccgcgaagcggatcgctatatcgagcaaggcaatgtgttccttaatggcaagcgagccaccattggcgatcaggtgaaacccggcgacgttgtgaaagtaaacggtcagttgattgaacctcgggaagccgaagatttggtacttatcgccctgaacaagcccgttggtattgtaagcaccaccgaagatggcgagcgcgataacattgtcgatttcgttaaccacagcaaacgcgtgttcccgattggccgcctggataaagactcccaggggctgattttcctcaccaatcacggcgatctggtgaataagatcctgcgtgctggcaatgatcatgagaaagagtatctggtgacggtcgataaaccgattaccgaggagtttattcgcggcatgagtgcgggggtgccaatcctcgggacagtgaccaaaaagtgcaaagttaaaaaagaagcgccgtttgtcttccgcattaccctggtgcaggggctgaaccgtcagatccggcgcatgtgcgagcatttcggctatgaagtgaaaaagctggaacgcacgcgcatcatgaacgttagcttaagcggcattccgctgggggaatggcgcgatttaaccgacgatgagttaatcgacctctttaagctcattgaaaattcctcttccgaggtaaaacctaaagcgaaggccaaaccgaaaacagcgggcatcaaacgtccagtcgttaagatggaaaaaacggcggaaaaaggcggtcgcccggcgtccaacggtaagcgttttacctcgccggggcgtaaaaagaaggggcgctgattaacgcctcagactgatgaaaacggcccaaaagtgcccggacagtcccctcgccccttcgggaaaagggttagggtgaggggaaaattgtgttcacactgacgagtgaaaatctcaggcgttgattgtggattagcgcctgccgcgcgtcgacgtatttgctgaccagctaaatgacgcttcaggatccggtttataagcctgctttttcttcaactggcgggcttttttcgcttcagcctcacgctcaaccattaatttatcgatgtaatctttcttaatgctgttggtttcggagttggtcaatacgcgaccatgcgcaatccgcgcccgatccagcagtgttttaagttcacgctgctcgcgttcagtcatctctttttgggtaatacgggggagtgccatgatggtgccctcagtgagccagagagttcagtgtacgggaattcgtttgcgagcagaactgataatattcattttgccttctcttaactatttatctctttcgataattaattagagatgcagataaaaaaattaaaggcaattattctccgataaagacgctggttaacagagtacaggctcgtttattgatgagcatagtgacaagaaaatcaatacggcccgaaatatagcttccaggccatacagtatttactcaaacaaattactatgcagtttttgcaccacctgctcggcatcttcgccgggcaccaggaagcacaggttatggctggatgcgccataacaaatcatgcgaatgttgaacggttccagtacgccgaatacctctttgccaacgccgcaggcttttgacaggtcattgccaatcaacgcgaccagcgccagaccttcttccacctccacccgacacagtgcggaaagctccatcagcagagattgcgtcagcaacgtatcgccagtggaggttgaaccggtggtatcaagggttaatgccacgctcacttctgacgtggtgattaagtctaccgaaatattatgccgcgcgaggatgccgaaaacttccgcgaggaaaccgcgagaatgcagcatattcaggctgtgcaaagtgagcagagtctgattgcgacgaagcgccagagcgcggaacagcggcggattttcagttttattgcacaccagcgtaccacctgcgcgtgggtctttgctggagccgacaaagaccgggatatcgctgcgtactgcgggtagcaacgttgccggatgcagtacttttgcaccaaaagttgccatctctgccgcttcggcaaacgcgatttcatcaatgcgttttgctgcggaaactacgcgtggatcggtggtgtagatgcccgggacgtcggtccagatatcaacacgagatgcgtgtaaagcctccgccagcaaggctgccgtataatcgctgcctccacggccaagcgtcgttgtacgacctttattttcgctaccgataaatccctgggtgatcactaagccttcattgagacgtgggagcagctgcagcgcggccagttccgccagcgcggctatatctggctctgcacgaccaaatcggtcgttggtacgcatcactttacgtacatcaaaccactgtgcctgaacatcgcgttcgcgcaggatctcaacaaacagcagggtcgacatcagctcgccgtggctgaccagctcatctgtcagcgccggagacgttgccagcgccgccgcttctgccagaacagtaatgttctccagcagacgttcaatctcttcacggataacgttcgggtaacgcagacgttccagaatggcaaactggatgttgcggatagcgtcgagtttttcgaatcgctcgccaggttccagtccttcagctaaagcgaccagcagattagtgataccagcagaagccgagaggacaactaaacgcacgttggcatcagaaagcacaatatcagcgctgcggttcatggcgtcaaaatcagctacgctggtaccgccaaatttggagacaacaatttcagacataactacctcgtgtcaggggatccattttcagccttggcacaagggaagagcggaagacgggtgggcgcagagcgatacttcgctactattttcacccagaagtgctccaccacttgcgaaacgcccgactgcgaacgcttctggtgacaacccaggggattcagcccctgtagccgatgatgaacgtggccagccgttcaatcacctcggcgatgcaccccctcaggtgttatcacaggactggctcctccaacaccgttacttgggcaacgcgcctcttctggcctgcgctagcgcaggtagtacatttataaataaagggtgagcggggcggttgtcaacgatggggtcatgcggatttttcatccactcctggcggtcagtagttcagctaataaatgcttcactgcgctaagggtttacactcaacattacgctaacggcactaaaaccatcacatttttctgtgactggcgctacaatcttccaaagtcacaattctcaaaatcagaagagtattgctaatgaaaaacatcaatccaacgcagaccgctgcctggcaggcactacagaaacacttcgatgaaatgaaagacgttacgatcgccgatctttttgctaaagacggcgatcgtttttctaagttctccgcaaccttcgacgatcagatgctggtggattactccaaaaaccgcatcactgaagagacgctggcgaaattacaggatctggcgaaagagtgcgatctggcgggcgcgattaagtcgatgttctctggcgagaagatcaaccgcactgaaaaccgcgccgtgctgcacgtagcgctgcgtaaccgtagcaataccccgattttggttgatggcaaagacgtaatgccggaagtcaacgcggtgctggagaagatgaaaaccttctcagaagcgattatttccggtgagtggaaaggttataccggcaaagcaatcactgacgtagtgaacatcgggatcggcggttctgacctcggcccatacatggtgaccgaagctctgcgtccgtacaaaaaccacctgaacatgcactttgtttctaacgtcgatgggactcacatcgcggaagtgctgaaaaaagtaaacccggaaaccacgctgttcctggtagcatctaaaaccttcaccactcaggaaactatgaccaacgcccatagcgcgcgtgactggttcctgaaagcggcaggtgatgaaaaacacgttgcaaaacactttgcggcgctttccaccaatgccaaagccgttggcgagtttggtattgatactgccaacatgttcgagttctgggactgggttggcggccgttactctttgtggtcagcgattggcctgtcgattgttctctccatcggctttgataacttcgttgaactgctttccggcgcacacgcgatggacaagcatttctccaccacgcctgccgagaaaaacctgcctgtactgctggcgctgattggcatctggtacaacaatttctttggtgcggaaactgaagcgattctgccgtatgaccagtatatgcaccgtttcgcggcgtacttccagcagggcaatatggagtccaacggtaagtatgttgaccgtaacggtaacgttgtggattaccagactggcccgattatctggggtgaaccaggcactaacggtcagcacgcgttctaccagctgatccaccagggaaccaaaatggtaccgtgcgatttcatcgctccggctatcacccataacccgctctctgatcatcaccagaaactgctgtctaacttcttcgcccagaccgaagcgctggcgtttggtaaatcccgcgaagtggttgagcaggaatatcgtgatcagggtaaagatccggcaacgcttgactacgtggtgccgttcaaagtattcgaaggtaaccgcccgaccaactccatcctgctgcgtgaaatcactccgttcagcctgggtgcgttgattgcgctgtatgagcacaaaatctttactcagggcgtgatcctgaacatcttcaccttcgaccagtggggcgtggaactgggtaaacagctggcgaaccgtattctgccagagctgaaagatgataaagaaatcagcagccacgatagctcgaccaatggtctgattaaccgctataaagcgtggcgcggttaatcatcgtcgatatgtaggccggataaggcgttcacgccgcatccggcaaccgatgcctgatgcgacgcggtcgcgtcttatcaggcctacaggtcgatgccgatatgtacatcgtattcggcaattaatacatagcacgattgattaaataaccttaataacaatgccgacgttatgtcggcatttttttatcagataaatccccttgtctgtaatttaacggaaatcataccgtgaggttaatcctaaaatagatttttaatcgttgtttatttcggaaaatacgcagattaattgcttttgtttttattttaagtttatgatttttattgttatttaaatataagttgaaacttatatttgatattcattccaattatcctaaaacgccatcgctaattccccgcgccgtaattcgcatgctttagttgtgtatactcgatcccgcccgaaatgtttttgggtaaatctccattcattcaatgaagggaaattgttatgaaaaaagttctgtatggcatttttgccatatctgcgcttgcggcgacttctgcgtgggctgcacctgtacaggtgggcgaagcggcagggtcggcagcaacgtcggtttcggcggggagttcctccgcgaccagcgtcagcaccgtaagctcggcggtgggtgtcgcgctcgcggcaaccggtggcggtgatggttctaataccgggaccaccacaaccacgaccaccagtacccagtaataaagtatgtatccccaaaataatttgagtcattgcatctgtggcttgaagtatgaagggatttaccataaccacactccggtgtggttattctgcccctctggagaagagtcgtgaagcgacctgcactcattcttatctgcctgctattacaggcctgttcagccacgactaaagagctgggcaattcactgtgggacagtctgttcggcccgccaggcgtacagctgacggatgatgatattcaaaatatgccctacgccagccagtacatgcagcttaatggcgggccgcagttatttgtggtgctggccttcgctgaagacggacaacaaaaatgggtcactcaggatcaggctactctcgttacccaacatggccgtctggtgaagactctgctcggcggcgacaacctgattgaagtgaataaccttgctgccgacccgctgattaaacccgcacaaatcgttgatggcgcaagctggacgcgcacgatgggctggaccgagtaccagcaggtacgctacgccaccgcacgctcagtcttcaaatgggatggcaccgataccgtcaaagtcggcagcgatgaaaccccggttcgcgtgctggacgaagaagtctccaccgaccaggcgcgctggcataaccgctattggatcgacagcgaagggcaaattcgccagtcggaacagtatctcggcgcggattattttccggtgaaaaccactctcatcaaggcggcaaaacaatgattaaacaaactattgtcgcgttgcttttgagtgtgggagcgtcatcggtcttcgcggcaggaaccgtcaaggtgttcagcaatggcagcagtgaggccaaaacgctaacgggcgcagagcatttaatcgatctggtaggccaaccgcggctggcaaacagctggtggcccggtgcggtgattagcgaagagctggcaacggcggcagcattgcgtcagcagcaggcgttgctgacacggctggcagaacagggcgcagattccagcgccgacgatgccgctgcgattaacgccttacgccagcaaattcaggcgttgaaagtgacgggcaggcaaaaaatcaatcttgatcccgatatcgtccgcgttgccgaacgcggtaacccgccgttgcagggcaactacacgctgtgggtcggaccaccgccgtccacggtcacgttgttcgggcttatcagccgtcctggcaagcagccattcactccaggtcgcgacgtggcgagctatctctctgaccagagcctgctcagcggtgcggatcgcagctacgcgtgggtggtttacccggacggacgcacgcaaaaagcgccggtggcttactggaacaagcgtcacgtagagccgatgcccggcagcattatttatgttggcctcgcggactccgtctggagtgagacgcctgatgcccttaacgccgacattcttcagactctgacgcagcggatacctcaataatgaaaaaaagacatctgcttagcttactggcgctgggcattagcatggcttgctacggcgaaacatatcctgcgcccattggcccgtcgcagtcggatttcggtggcgtaggattattacaaacgcccaccgcacgcatggcgcgggaaggggagttgagcctgaactatcgcgataacgatcagtaccgttattactcagcttcagtgcaactcttcccgtggctggaaacaacgctgcgctacaccgacgtgcgcacccggcagtacagcagcgtcgaagcgttctctggcgatcaaacgtataaagataaagccttcgatctcaaactgcgtttgtgggaagagagttactggctgccgcaagtggcggttggtgcgcgggatatcggcggtacggggctgtttgatgcggaatatcttgttgccagcaaagcctgggggccgttcgattttacgctcggcctgggctggggatatttgggcaccagcggtaatgtgaaaaatccgctctgttcagccagtgataaatattgctatcgcgataacagctacaaacaggcgggatctatcgacggtagccagatgttccacggtcctgcctcactgtttggcggcgtggaataccagacgccctggcaaccgctgcgcctgaaactggagtatgaaggcaataattatcagcaggattttgccgggaagctggagcaaaaaagtaagtttaacgtcggtgcgatttatcgcgttaccgattgggccgacgttaaccttagctatgaacgtggcaacacctttatgtttggcgttacgttgcgcaccaactttaacgatctgcgcccgtcttacaacgataacgcccgcccgcaatatcaaccgcagccgcaggatgccattttgcagcattcggtggtggcgaatcagttaacgctgttgaaatacaatgccggacttgccgatccacagatccaggcgaaaggcgatacgctgtatgttaccggcgagcaggtgaaatatcgtgattcgcgcgaagggatcatccgtgcgaatcggatcgtgatgaacgatctgccggatgggatcaaaacgatccgcattacggaaaatcgccttaacatgccgcaggcgacgacggaaaccgatgtcgccagcctgaaaaatcatctcgccggagagccgttgggccacgaaacgacgctggcgcaaaaacgcgtcgagccagtggttccgcagtccaccgagcagggctggtatatcgacaaatcacgctttgatttccatatcgatccggtgctgaaccagtcggtcggtggcccggaaaacttttacatgtatcagctgggcgtgatgggaacggcagatttgtggctgacggaccatctgctgaccaccggcagcctgtttgcaaatcttgccaacaactacgacaagtttaactacactaatcctccgcaggactcgcacttaccgcgcgtgcgtacccatgtgcgcgagtatgtgcagaacgatgtctatgtgaataacctgcaagccaactacttccagcatctgggcaacggcttctacggtcaggtctacggtggttatctcgaaaccatgtttggcggtgcgggggcagaagtgttgtatcgcccgctggacagcaactgggcgtttggtctggatgccaactacgttaaacagcgcgactggcgtagtgcaaaagatatgatgaaattcaccgactacagcgtgaaaaccggacatctgaccgcctactggacgccatctttcgctcaggatgtgttagttaaagccagcgtcgggcagtatctggcaggggataaaggcggcacgctggagatcgccaaacgctttgatagcggcgtggtggtgggtggctatgccacgatcactaatgtttcgaaagaggagtacggcgaaggggacttcaccaaaggcgtgtatgtctcggtaccgttggatctcttctcgtctggcccgacacgcagccgtgcggcgattggctggacgccgctgacgcgtgacggtggtcaacaacttgggcgtaagttccagttgtatgacatgaccagcgaccgtagcgtcaatttccgctaagtcatgggaaaggtgccagttttcgcaatcactggcaccctcattcttaatggcctgttgagccatcaggaacgcagttcacccccggtttgcgatctggtgtgtaaaggcgaaaacattctgtcttcctgtccgtcgatatcggttgcaggtctggttgcctgagcgactgggccatcattgggctggagacattgctttgcggtaggtcggctttatcagcagtaccgagcggaccagcataagcaggaagaacagagactgataacatcaaagcagcaaaataaggcttcatttttaccacctttatcaggttacgtttcatttgttccagaggaacattgtcgatttttcgcgcattgctggtggctgggaatcacctgaatgggtgatttttgaattaccggctttggtgcggtttgtcttgccggatgcgccgccaggcgcggcttatccggcctacgggtaggtatatccggctttggtggaggcgcgctccaaatccaggttgaacaaaacatacacaaaaaatatagatctccgtcacatttttgcgttatacaggaagctcgccactgtgaaggaggtactgctatgacgtcactctctcgtccgcgcgtggagtttatctccaccattttgcagaccgtactcaatcttggcctgctgtgcctcggcctgattttggttgtcttcctcggcaaagaaacggtgcatctggctgatgtgctgttcgcgccagaacaaaccagcaaatatgagctggtagaaggactggtggtttactttctctatttcgaatttatcgcgctgattgtgaagtactttcagtccggttttcacttcccgctacgttactttgtctatattgggatcaccgccattgtgcgcttgatcatcgtcgatcataaatcgccactggatgtgttgatctactcggctgcgatcctgttactggtgatcaccctgtggctgtgtaattcgaaacggctgaagcgggagtaaaaagtcagcacgccgaaatggcgcggcgtgctggacaggaagattacagcgtagcagtttgttgtgttttcttcgtttccggttcccagagcgcttccagctcctcaagggttttacctttggtttccgggacaaatttccacataaacagtgctgccagaacgcccatacaaccgtaaatccagtaggagaaaccgttgtggaaatgggccaccagccaggagtttttgtccatcatcgggaaggtccaggagacgaagtagttcgccagccactgggccgccaccgcgattgccagcgctttaccacgaatagcattcgggaagatttccgacagcagtacccagcataccggaccccaggacatggcaaaggcggcaacatagaacagcatcgacagtagcgccacaatacccggtgcctgagtgtaaaacgcggtaccgaggctaaacataccgattgccattccgagtgcgccgataatttgcagtggcttacgaccaaatttatccaccgtcataattgccagaacggtgaaggtgaggttgataactccgacaataatggtctgcaacagcgcgatatccgtgctggcccccagcgttttgaacacttccggcgcgtagtacagcaccacattgatgccgacaaattgctggaagatggagagcattacgccgattacaatcacgcccacgccaaacatcagcagacgaccaccggttttgcggccatgatccagggagtgtttaatttcctgtactgcctgagttgcaagcgtgttgcccataattttgcgcaggataccttccgcctgttcttgcttgccgcgcgacatcagccagcgaggactttctggcacggtatacagcagcattaagaacagcagtgcagggatacattccgaggcaaacatataacgccagccgtcagtattcagccagctggcatcaccggaacgggcaataaaatagtttacgcagtaaactaaaagttgcccgaaaataatcgcaaactggttaaaagagaccagtttcccgcgaatatgagctggagccagttccgcaatatacattggcgagagcattgaggctaaaccaacgccaataccgccaataatgcgataaataacaaattccgggacataacctgccagataaacaggcactgtgttgtccgggtttatagaggtaaaaccaagttctggccaggcagaacctacaccagaaataaaaaacaggacagcagcaatcttaagtgaatcacgacgaccgaagcggttactgcaataaccaccgagggcaccgccgatgatgcaaccaatcagagcgctggccacgcaaaaccctaacagggagttggcagcggattcacttaagttttgtggagcaacaaagacggtattgagtgactcaacagtaccggaaataacggcggtgtcgtagccaaataataaaccacctaatgtagcgactaaggtaatcgaaaatatataactggaattatactgggtattcattcagacctgccttagaccattctgatcttttatcagtgcattgatgttggaattgtcaggcagttaaggcaattatcattttttacaatgcgtttacgtaatgtcttttctgtgatcttaattgtgataattatccaaaattgataaaaacaatactattgccgtgactcagagcacgaaagagaattatcgtaagtgggaaaacaaataacgtaaaaataataagctctatgatggaaatattaaccggcgaacgattcagattgcagacgaaagaaaaaaaggcgctccgtggagcgccgaataacagtcacaagttgggataacgtaagttgagggtgcagcggcataacattggcagaacaacatctttaacctttcacaccacctgccgtcaggccgttgaccagccagcgttgagccagcaagaagacgatggtgatcggtaatgcagacatcacggcagcggcggcaaagtcaccccacaggtagttttgcgggttgaggtattgctgcatccccacggccagggtgtagctgtttacgtcacgcagtaacagcgacgcgaccggaacttcagtaatggcagcgataaacgacaggatgaataccaccgccagaatcggtactgacagcggcaacaggacaaggcggaaggcctgccacggtgtcgcaccatccagcgcagcagcttcttccagcgaactgtcgatggtttcgaaatagcctttgatggtccagacatgcagcgcaatcccacccagatacgcgaaaattacgccgccgtgagtattcaggccaatgaatggaatgtactcacccagacgatcaaacaacgcatacaacgcgaccagtgaaagtactgccgggaacatctggaaaatcagcattcctttcagcagcgtcgctttgcctggaaagcgcatacgggcgaaagcgtaggcgcaggtggtggagagcgccacaatgccaatcgcggaaatcccggcgacctttaccgagttccacagccacagcagtaccgggaatggcggtggcgtaatgcgaccatcagcctgttcaacgctaaaacctaacgccagtttccagtgatcccaggagatttgctccgggatcaggctgccggtcgcaaagtttccctgacgcagcgagatagcgacgaccatcagcagcgggaacataatcgctgcgataaaaagtagcagtagcaggtgagtaataaataaacgagctttttgcgatttcggttggaccattgccatttttgttatctcccttaatcaaacttcattcgcgtggctttcaggttcactatcgccagcgcacccaccagcaggaagatcagcgtggcaattgctgccgccagaccgaagtcctgacccccgccgccttcaaaagcgatgcggtaggtgtagttaacaagcaggtcggtataaccggctggcgtggtcgtgccaagacgatccgggccgccgttggttaacagttgaatcagcacgaagttgttaaagttaaaggcgaagctggcgatcatcagcggcgtcagcggtttaatcagcagcggcagcgtaatcttaaagaagttctggaacggacctgcgccatccattgctgaggcttcatacaaatcgtccggaatcgctttcagcaagcccatgcagaggatcatcatgtacggataacccagccaggtattgacgataattagcatcgtgcgggcggtggtcggatcgctgaaccaggcgggcttcacgccaaacagcgcgctcaacatcatgttgatttcaccgaagctctggttaaacaaccctttgaaaatcaagattgaaatgaacgatggcaccgcgtagggcagaatcagcaggacgcgatagaccgctttgccgcgcaacgcttcccactgcaccagacacgccagaaccatgccgaccgccaccgttaaaaagacagtgatcagcgagaacaccacggtccagacgaaaatggcgaggaacggtttctgaatgccttcgtcggtaaagacgcgggtaaagtttttccagccggtggtcacggtgtaaccggggcttagcttttcatcaccccagttgccgtcggcggtaatggactggtaaaagccaatttggttattcggacgatatttcacgccgctctgattattcgtcaacgtgccgtcaccgtcgagtgtgtagagcggctgcgtgccagaaaactggcgcagggagctcatcatcactttgttgccatccggcagaatggcggtaatgtcactcagcgcctgacgattctgggtaatcacgcgcagattcgcgcgttcgccttcgggctgggcggtcgtttctttcagttgcagtttttgctcgccgccaaatttaaaagcgtcggagaggtaatttttgccggtttcgccgtcgctgagcgccagttgccactcatcgcccgccgggtaaagaccaaagttataggttttgcctgcttgccaggagcgatctaacaacacttcctgcgcacgttcaaaagtcagctggttagtgctgctgtagttggtgaaggcaatggcgatggtgcagaccagagggaagaggacgaataatcccattccagccattcccgggtaaacatagcgccaggcgtaggctttacgattggcgaaaatatacagccccgctgaactcaatatcagcgtggtaatggcgaacaggtattccccttgtgcgtacattaaaacaacaaggtaacccaccagcaggccgagcagacctagcactgaccatttcagcgcgtcgctttgccaccaatgtttctttttaatgacatccatggggttcttcctcattccaggacggataaggctttcacgccttatccgacaacaactgcctgatgcgacgctgacgcgtcttatcaggcctacatacgtttcggttttgtaggccggacaaggcgttcacgccgcatccggcatttcacagcattacttggtgatacgagtctgcgcgtctttcagggcttcatcgacagtctgacgaccgctggcggcgttgatcaccgcagtacgcacggcataccagaaagcggacatctgcgggatgttcggcatgatttcacctttctgggcgttttccatggtggcggcaatacgtggatctttcgccaactcttcctcgtaagacttcagcgctacggcacccagcggtttgtctttattaaccgcttccagaccttcatcagtcagcagatagttttcgaggaactctttcgccagctctttgttcggactggcggcgttaatacctgcgctcagcacgccaacgaacggtttggatggttgacccttgaaggtcggcagtaccgttacaccataattcactttgctggtgtcgatgttggaccatgcccacgggccgttgatggtcatcgctgtttcgcctttattaaaggcagcttctgcgatggagtaatcggtgtctgcattcatgtgtttgtttttaatcaggtcaaccaggaaggtcagacccgctttcgcgccagcgttatccacgcccacgtctttaatgtcgtacttgccgttttcatacttgaacgcataacccccgtcagcagcaatcagcggccaggtgaagtacggttcttgcaggttgaacatcagcgcgctcttacctttcgctttcagttctttatccagcgccgggatctcttcccaggtttttggcgggttcggcagcagatctttgttataaatcagcgataacgcttcaacagcgatcgggtaagcaatcagcttgccgttgtaacgtacggcatcccaggtaaacggatacagcttgtcctggaacgctttgtccggggtgatttcagccaacaggccagattgagcgtagccaccaaagcggtcgtgcgcccagaagataatgtcagggccatcgccagttgccgcaacctgagggaatttctcttccagtttatccggatgctcaacggtgactttaattccggtatctttctcgaatttcttaccgacttcagcgagaccgttatagcctttatcgccgttaatccagattaccagtttaccttcttcgattttggcgagagccgaggcggaaaacatcatcgtcgttaatgcggataatgcgaggatgcgtgcacctgtttttattttcataatctatggtccttgttggtgaagtgctcgtgaaaacacctaaacggactctagtttctttatacggcaacctctttccatcctccttgcccctacgccccaccgttgctttgtgtgatctctgttacagaattggcggtaatgtggagatgcgcacataaaatcgccacgatttttgcaagcaacatcacgaaattccttacatgacctcggtttagttcacagaagccgtgttctcatcctcccgcctcctcccccataaaaaagccagggggtggaggatttaagccatctcctgatgacgcatagtcagcccatcatgaatgttgctgtcgatgacaggttgttacaaagggagaagggcatggcgagcgtacagctgcaaaatgtaacgaaagcctggggcgaggtcgtggtatcgaaagatatcaatctcgatatccatgaaggtgaattcgtggtgtttgtcggaccgtctggctgcggtaaatcgactttactgcgcatgattgccgggcttgagacgatcaccagcggcgacctgttcatcggtgagaaacggatgaatgacactccgccagcagaacgcggcgttggtatggtgtttcagtcttacgcgctctatccccacctgtcagtagcagaaaacatgtcatttggcctgaaactggctggcgcaaaaaaagaggtgattaaccaacgcgtcaaccaggtggcggaagtgctgcaactggcgcatttgctggatcgcaaaccgaaagcgctctccggtggtcagcgtcagcgcgtggcgattggccgtacgctggtggccgagccaagcgtatttttgctcgatgaaccgctctccaacctcgatgctgcactgcgtgtgcaaatgcgtatcgaaatctcccgtctgcataaacgcctgggccgcacaatgatttacgtcacccacgatcaggtcgaagcgatgacgctggccgacaaaatcgtggtgctggacgccggtcgcgtggcgcaggttgggaaaccgctggagctgtaccactatccggcagaccgttttgtcgccggatttatcggttcgccaaagatgaacttcctgccggtaaaagtgaccgccactgcaatcgatcaagtgcaggtggagctgccgatgccaaatcgtcagcaagtctggctgccagttgaaagccgtgatgtccaggttggagccaatatgtcgctgggtattcgcccggaacatctactgccgagtgatatcgctgacgtcatccttgagggtgaagttcaggtcgtcgagcaactcggcaacgaaacccaaatccatatccagatcccttccattcgtcaaaacctggtgtaccgccagaacgacgtggtgttggtagaagaaggtgccacattcgctatcggcctgccgccagagcgttgccatctgttccgtgaggatggcactgcatgtcgtcgactgcataaggagccgggcgtttaagcaccccacaaaacacacaaagcctgtcacaggtgatgtgaaaaaagaaaagcaatgactcaggagatagaatgatgattactctgcgcaaacttcctctggcggttgccgtcgcagcgggcgtaatgtctgctcaggcaatggctgttgatttccacggctatgcacgttccggtattggctggacaggtagcggcggtgaacaacagtgtttccagactaccggtgctcaaagtaaataccgtcttggcaacgaatgtgaaacttatgctgaattaaaattgggtcaggaagtgtggaaagagggcgataagagcttctatttcgacactaacgtggcctattccgtcgcgcaacagaatgactgggaagctaccgatccggccttccgtgaagcaaacgtgcagggtaaaaacctgatcgaatggctgccaggttccaccatctgggcaggtaagcgcttctaccaacgtcatgacgttcatatgatcgacttctactactgggatatttctggtcctggtgccggtctggaaaacatcgatgttggcttcggtaaactctctctggcagcaacccgctcctctgaagctggtggttcttcctcttttgccagcaacaatatttatgactataccaacgaaaccgcgaacgacgttttcgatgtgcgtttagcgcagatggaaatcaacccgggcggcacattagaactgggtgtcgactacggtcgtgccaacctgcgtgataactatcgtctggttgatggcgcatcgaaagacggctggttattcactgctgaacatactcagagtgtcctgaagggctttaacaagtttgttgttcagtacgctactgactcgatgacctcgcagggtaaaggtctgtcgcagggttctggcgtcgcgtttgataacgaaaaatttgcctacaatatcaacaacaacggtcacatgctgcgtatcctcgaccacggtgcgatctccatgggcgacaactgggacatgatgtacgtgggtatgtaccaggatatcaactgggataacgacaacggcaccaagtggtggaccgttggtattcgcccgatgtacaagtggacgccaatcatgagcaccgtgatggaaatcggctacgacaacgtcgaatcccagcgcaccggcgacaagaacaatcagtacaaaattaccctcgcacaacaatggcaggctggcgacagcatctggtcacgcccggctattcgtgtcttcgcaacctacgccaagtgggatgagaaatggggttatgactacaacggcgatagcaaggttaacccgaactacggcaaagccgttcctgctgatttcaacggcggcagcttcggtcgtggcgacagcgacgagtggaccttcggtgcccagatggaaatctggtggtaatagcaaaacctgggccggataaggcgtttacgccgcattcggcaaccaacgcctgatgcgacgcttgcgcgtcttatcaggcctacaacggctgtcaaatgtaggccggataaggcgtttacgccgcatccggcataaaaacaggttgtcattatctgaaaggggcgaaagcccctctgattatcgggtttagcgcgctattgcctggctaccgctgagctccagattttgaggtgaaaacaatgaaaatgaataaaagtctcatcgccctctgtttatcagcagggttactggcaagcgcgcctggaatcagccttgccgatgttaactacgtaccgcaaaacaccagcgacgcgccagccattccatctgccgcgctgcaacaactcacctggacaccggtcgatcaatctaaaactcagaccacccaactggcgactggcggccaacaactgaacgttcccggcatcagtggtccggttgctgcgtacagcgtcccggcaaacattggcgaactgaccctgacgctgaccagcgaagtgaacaaacaaaccagcgtatttgcgccgaacgtgctgattcttgatcagaatatgaccccatcagccttcttccccagcagttatttcacctaccaggaaccaggcgtgatgagtgcagatcggctggaaggcgttatgcgcctgacaccggcattggggcagcaaaaactttatgttctggtctttaccacggaaaaagatctccagcagacgacccaactgctcgacccggctaaagcctatgccaaaggcgttggtaactcgatcccggatattcccgatccggttgctcgtcataccaccgatggcttactgaaactgaaagtcaaaacgaactccagctccagcgtgttggtcgggcctttatttggttcttccgctccagctccggttacggtaggcaacacggcggcaccagctgtggctgcacccgctccggcaccggtgaagaaaagcgagccgatgctcaacgacacggaaagttattttaataccgcgatcaaaaacgctgtcgcgaaaggtgatgttgataaggcgttaaaactgcttgatgaagctgaacgcctgggatcgacatctgcccgttccacctttatcagcagtgtaaaaggcaaggggtaattacgccccacagtgctgattttgcaacaactggtgcgtctcctggcgcacctttttttatgcttcattccagggatatgagcgattttttatagtacttcatttcttcttcactaagaatgtgcattatctcaatgccttatcagagattcttttcctttcgccggtagtgtctggacgctcaggctactttttccagttatttcatttctgtaatgcagaggttttatgttaggtcatatctcaaagtttgacggcaataactctttgataaaacatggtgtggtgcaaggaaataatatagtcgatcttgatttactacgtaattttaatggggtgccagggttaaatcgagaaaactttatttatatcagcaatatttttttaaatataaaacaacggaacgaaaaaaatcatgcaataaatatgtttcgtgaagtctcaattagtaatgatactataagtgtaaaattctatagaaatgaagaaatagaatgtgcttgtgattttctgatggataaagacgcgcaggggtatatcgacctgtctgatttggatttaacaagttgtcattttaaaggtgacgttatatcgaaggtgtcttttttatcatctaatctacaacatgtaacattcgaatgtaaagaaattggggattgcaattttactactgcaacagttgataatgtcatatttaaatgtcgacgtttacacaatgtgatttttatcaaagcgagtggtgaatgtgtcgattttagcaaaaatattcttgatacagttgacttctcgcggagccagcttactcatagtaattttcgcgaatgtcagattagaaattcaaacttcgataattgttatctttatgcttcgcacttcaccagagcagaatttctttctgacaaagaaatatcatttattaaatcgaatttgacagctgttatgtttgatcatgtgcgaatatcgacagggaattttaaagacagcgttacacaactaatggtattatctattgattactcagatatatttggaaatgaagatctcgatgattatatcaataacattataaaaatgattgatacattgccagatgaaccagcgatattgaaatccgttctggcagtaaaactggtaatgcaattaaaaattcttaatattgttaataaaaactttattgagaatatgaagaaaatatttagccattgtccttatataaaagatcccattatacgtagttatatccattctgatgaagataacaagttcgataattttatgcgtcaaaatcgattcagtaaggtgaatttcgatacccaacaaatgatcgattttattaacagatttaatatgaataaatggctgattgataaaaataacaatttttttatccaacttatcgatcaggccttacgatcaacggatgatatgatcaaagcaaatgcctggcatctttataaagagtggattcgtagtgatgatgtttcacctatatttatagaaactgaagataatttaagaacctttaacacgaatgaattaacacgaaacgataatatctttatcctgttctcctctgtcgatgatgggccagttatggtggtaagctcccagcgcttacatgatatgttgaatcctacaaaagataccaattggaattccacgtatatctacaaatccagacatgagatgttgcctgttaatcttactccggaaacacttttcggctctaaatctcaggataaacatgcgcttttccccatttttactgcgagttggcgagctaatcgtataaagaataaaggtatttaagtaaaggaaaacatcaccgttcctggcatcctgggcggtgatgcccctatggttgccctctccagcgcgggcatcggcaaagcgtaaggttcaacagcgttttaccacttcatgcgattgttgcgtttttgttgcgtattagatcacttaatttgctttacatctcccgtaaacacttttctgcgatacaatgcctttacgttatgtaacggagagttcggcatgtcacaccccgcgttaacgcaactgcgtgcgctgcgctattgtaaagagatccctgccctggatccgcaactgctcgactggctgttgctggaagattccatgacaaaacgttttgaacagcagggaaaaacggtgagcgtgacgatgatccgcgaagggtttgtcgagcagaatgaaatccccgaagaactgccgctgctgccgaaagagtctcgttactggttacgtgaaattttgttatgtgccgatggtgaaccgtggcttgccggtcgtaccgtcgttcctgtgtcaacgttaagcgggccggagctggcgttacaaaaattgggtaaaacgccgttaggacgctatctgttcacatcatcgacattaacccgggactttattgagataggccgtgatgccggactgtgggggcgacgttcccgtctgcgattaagcggtaaaccgctgttgctaacagaactgtttttaccggcgtcaccgttgtactaagaggaaaaaaatatggagtggagtctgacgcagaataagctgctggcgtttcatcgcttaatgcgtacggataagccaattggcgcgttactgctgctctggccaacattatgggcgttgtgggtggcgacaccgggcgttccccagctctggatcctggcggtgtttgtcgcgggtgtctggctgatgcgcgctgccggatgtgtggtgaatgattatgctgaccgcaagtttgatggtcatgttaagcgcactgcgaaccgaccacttcccagcggcgcggtaacagagaaagaggcgcgcgcgctgtttgtagtgctggtactgatttcgtttttactggtgctgacgctgaatacgatgaccattctgttgtcgattgccgcgctagcgctggcgtgggtgtacccgtttatgaagcggtatacccatctaccgcaagtggtgctgggcgcggcgtttggctggtcgattccaatggcttttgccgctgtgagtgagtcggtgccattgagttgctggttaatgttcctcgccaatattctctgggcggtggcttacgacacgcagtatgcgatggttgaccgcgatgatgatgtgaagattggcattaaatccacggcaatcctgttcggccaatacgataaattgattattggtattttgcagattggcgtactggcgctgatggcgatcatcggtgagttaaatggcttaggctggggatattactggtcaattctggtggctggcgcgctgtttgtttatcaacaaaaactgattgccaaccgcgagcgtgaagcctgctttaaagcatttatgaataataactatgttggtctggtactgtttttagggctggcaatgagttactggcatttctgatgatgtaaaaaagccggatgatcatccggctttcttctggggtgcctgatgcgctgcgcttctcaggcctacacaacagatcgcaatttattgaatttgcagattatggtaagccggataaggcgtttgcgccgcatccggcaattctcactgattacccttcgccctgcgtcgcactctcaatcgtcaaacgcacgtctgatgtaatcaactccgccagcaactgataaaccttcatcgtttctgccggttcggcatcgccgctatcgctgatatacccttcatcacgcagcgtcagcaccagagaactgaacaccgccttgtcgaagaactccggcgcgttgataccgtgcagcacggagagacgttgcgcgacggtgcggctctctttctccagcgtaccgcggttgatcgacgggttggcgctcaacagccagaaggtgatggcataacgttgcagcgtttcgcgcgcgcctgcggcgagcagctgtagcgtgcgagaatgcgccgggttgatatgcaactcatcatcttgcagggtaatcagcccctgacgttgcatctcatttgccagcgcatcaataacgtccggcaactcgtcgcgatcccagcgcaggaacagctccgctttcagcattgggtaaagcacattgacgtgctccatcaatacgtcgcgggagatgtggcgatgctgggtgacaattgccgccatcagcgaaggcagcaccaacatatgcgcaatgttgttgcgatagtaggtcatcaacaccgcttgctcgcgcggcagaatgatgatgtcgccgatagtgtctttctcgacttcaaacttgttcatttgcagcgcgtgatcgataagctcgctggcgctggctgaaggaacggtagagtccgtggagtaaggtacgttgcgcatcagatccaggtagcagttgagttgctcggttaactgctcgcgggtgagtgagcgctgacgtgacgccagtagcgcagtacagcacaggttcatggcgtttgccgcgcctgcgttgttaatgcgtaccatcagatcggcagcaatattattgaccgtcggcgttaaccaggccggacgcaccgcttcgatgggatcgatagattcacgccagtctggtacgtgctggttaaggtaggtcatcaacggcattggttcaccgaaattgacgtaaccctggccgagattacgcagcttgcttaaaccgcgcagcatctgcggcaggctctctttctctttcgtcgcaccgcgcagttctttggcgtaagtacccacttccatgacgtgctcataaccgatatagatcggaatcagcgtaatcggacgcgtgccgccacgcagcatcgcctgaatggtcatcgacagcgtaccggttttcggatccagcaaacgccccgtacgggaacgaccgccttccacgaagtactcgacggaataaccacggctgaacagttcgccgagatactcacggaaaacggtggaatagagcttattgcctttaaaagtacggcgaataaagaacgcacccagacggcggaaaatcggcccggccggccagaagttcaggttgatcccggcggcgatatgcggcggcaccagcccctggtggtacagcacgtaagaaagcagcaggtagtccatgtgactgcggtggcaaggcacatataccagctcatgaccgtcgtgggccagctggcgaacgcgctcggcgttatggacgttgatgccctggtaaaggcggttccaggtaaagcccagaatacggtcagtcaggcggatcatctcgtaagagaaattcgccgcaatctcttccatcagcgcaatcgcgttctgctgcgctttttcatgggagatttttttgctgcgcgcttcatcttctaccgctttcgcaatagcgcgggaggcgagcagcttattaaacagatcctgacgagcaggcagacgtgggcctacggcagccagacgttgacgggcaaagtgcatacgcgccacgcgcgccagtttctgcgcgatagttttatccgtgccgtgttcatccgccatacggcgcagcgaaactgacggcgagaaacgcacaaaactgtcgcgaccgagccacagtacagcgaaaaatttctgtacgccgttaagcatacgcagcggcgggttcacttcgcctttttcacgccctggcgcgcgaccaaacatcaccgatactggcaccatctgcacatccagatttgggttgctacggtgcaaatcgagatagtcgtggaacagcttaatagactcttctttcggcgtgtaataggtgaatacacgcggcccgccgtgaatgaacacatagcgcggcagtagcgtgccgtcgatttccagcggctctaacgggtcaggcaggtcatgtgccagacactgggcgcgcaacgtcagcaaatctgctttcgagttgtacggtaaaacgtacataattggacgagaggtatccagccccagttccggggcaggatctgccggaatagacttgctttttaccaggatgcttaatggtaaattcagtaatttgtagtaaattcgtggccagccggacataaacgatgtaaagcctctggttaataatgcaaatgcgcggcaaggatagcagaaagtcatgggaaattctgtggtatccgctcatgtttcgcgcggcgttacgcaaacccgaatcatcggatttaacggtacactgatattgacgctcataatgtaaaaaggttctttcaatggccaataataccactggattcacccgaattatcaaagctgctggctattcctggaaaggtttacgcgctgcatggatcaacgaagcggcattccgtcaggaaggcgtagcggtattgttggcggtggtcatcgcctgctggctggatgtggacgcaattacccgcgtgctgcttatcagctccgtgatgctggtgatgattgtggaaatcctcaatagcgccatcgaagcagtggttgaccgaattggctctgaataccatgagctttccggacgcgctaaagatatgggatccgccgcggtgctgattgcgattatcgtcgccgtgataacctggtgcatcctgttatggtcgcattttggataacccttccagatttcgataaatctctggtttattgtgcagtttatggttccaaaatcgccttttgctgtatatactcacagcataactgtatatacacccagggggcggaatgaaagcgttaacggccaggcaacaagaggtgtttgatctcatccgtgatcacatcagccagacaggtatgccgccgacgcgtgcggaaatcgcgcagcgtttggggttccgttccccaaacgcggctgaagaacatctgaaggcgctggcacgcaaaggcgttattgaaattgtttccggcgcatcacgcgggattcgtctgttgcaggaagaggaagaaggggtgccgctggtaggtcgtgtggctgccggtgaaccgcttctggcgcaacagcatattgaaggtcattatcaggtcgatccttccttgttcaagccgaatgctgatttcctgctgcgcgtcagcgggatgtcgatgaaagatatcggcattatggatggtgacttgctggcagtgcataaaactcaggatgtacgtaacggtcaggtcgttgtcgcacgtattgatgacgaagttaccgttaagcgcctgaaaaaacagggcaataaagtcgaactgttgccagaaaatagcgagtttaaaccaattgtcgttgaccttcgtcagcagagcttcaccattgaagggctggcggttggggttattcgcaacggcgactggctgtaacatatctctgagaccgcgatgccgccaggcgtcgcggtttgtttttcatctctcttcatcaggcttgtctgcatggcattcctcacttcatctgataaagcactctggcatctcgccttacccatgattttctccaatatcaccgttccgttgctgggactggtcgatacggcggtaattggtcatcttgatagcccggtttatttgggcggcgtggcggttggtgcaacggcgaccagctttctctttatgctgttgctgtttttacgcatgagcaccaccgggctgactgcgcaggcttatggtgccaaaaatcctcaggcattagcccgtgcgctggtgcaaccgttgttgttggcgttgggggctggggcgttaattgcgctgctgcgtacaccgattatcgatctggctctgcatattgttggcggtagtgaagcagtcctggaacaggcgcggcgctttcttgaaatccgctggttaagcgcaccggcgtcgctggcgaatctggtattactcggttggttactcggcgtgcaatatgcccgtgcgccagtaattttgttagtggtcggcaatatcctcaacattgtgctggatgtctggctagtgatggggctgcatatgaacgtgcagggcgcggcgctggcgacggttattgcggaatatgcaacattgctgattggtctgctaatggtgcgtaaaatcctcaaactacgcggaatttccggcgaaatgctgaaaactgcctggcgaggaaacttccgtcgcttgctggcgcttaaccgcgatatcatgctgcgttcgctgttgttgcaactctgtttcggcgcgatcaccgtacttggtgcgcgactggggagtgacattatcgctgttaacgcggttctgatgacgctactcacctttaccgcctatgcgcttgatggttttgcctacgcggttgaagcgcactccggtcaggcatacggtgcgcgcgacggtagccagttgctggatgtatggcgggcagcgtgccgccagtcggggattgtagcgttactgttttcggtggtttatttgctggcaggggaacacatcattgcgttgctgacgtcgttaacccagattcagcagctggctgaccgctatcttatctggcaggtgattttgccgttggttggcgtctggtgttatctgctggacggcatgtttataggcgcaacgcgtgccgccgaaatgcgtaacagtatggcggtggccgccgcaggttttgcgctgacgctccttacgctgccgtggctgggtaatcatggtttgtggctggcattaaccgtctttctggcgttgcgcgggctttctctggcggctatctggcggcgtcactggcgtaacggtacctggtttgccgcaacgtgacggttaaaaattctgaataaattatcctaagccaaattgctgactacacttaatctcacgttcagaagaaaagtgaacgtactctcattcacaacctaacgatgaggtcttgattatgaataaagatgaagccggcggtaactggaaacagtttaaaggtaaagtgaaagagcaatggggcaaactgaccgatgatgatatgacgatcattgaaggtaaacgtgatcaactggtcggtaaaatccaggaacgttatggttatcagaaagatcaggcagaaaaagaggtcgtggattgggaaacccgcaatgaatatcgctggtaattaatccctcctgcccgacgtgtacaaggatgtacgccctcttaacgcggtttctttttcacctgcacagagtgatcatgctggcactgttcaggatgacgacacgcttccacttccacgcatgccgcacagagcccatgtgcttcaatcacattatgccgcagggcaaaacccatttttgccgccagcgtatgcatgatgtcttccacgccttcagcacactcttctttcaccgcgccgcagcgatcgcaaataaacatggctgacgtatgggtgggctggtcgaacagatgacagagcacataactgttggtggattccaccttatgcacaaaaccttgctcaagcagaaaatccagcgcgcgataaaccgttggcggcttggcttgcggttcagcttcgcgcagtaaatcaagcagatcataagcgctgatagcgccatcctgcagactcatcaggcgcaacacttccaggcgctgtggggtcaggcgcacattacgctgcgcgcagattttttcagcctgcgctaataactcctgcgttgtggtcttttccatcgggcacctcaaagtgggggttaagaatgtccttactttaccatgttccaggaaaaacaccgagaacccttattgttgccgtaatgttgattttctgttttgtaggtaaggtgttgtgttgccttgtcgtaccattatcaacacgataataattaataattcatttttaaataaattgcttcaagttaactcgctatttatttaactgggtttaaacgcatacctgtagttcagaaattatgagcgatttttgatagtgaccagatggcaaaagaattataaggaggacacggtacgacaaaaaaggtagatgaatcatgttgaagataatacccggtgcaactagatactttaataaaacactcaattcaaatcaattcgataatgaagatgcaatcaaagataaattagataatagaggttcaatcaaaggtaaattaaataatatatatggtaaatctattgattatgcagcgctgcgtcatcgggatataattattgcaaaaatagatttgtttattcaacgaatcacgcataatttatggcatgcacgtaaaaaaatgtgtttttaattgagcaaataaatgatctcaaaatgtgggtcaataagtatattgacgattgcactgatgaggatttaaacgatcgtgactttattgcatcagttgttgaccgggctatttttcatttcgcgattaatagtatatgtaatcttggggataataaagatgcaatgcccattgaacaatgtacttttgatgtagaaactaagaatgaccttccctccacggttcagctattttatgaggaatctaaggataatgaacctttagcgaatatacattttcaagcaataggttctggttttttaacgtttgttaatgcctgccaggaacatgatgacaacagcttaaaattatttgcttcgctgttaatttcactttcatattctagtgcctacgcagatttatcagaaacagtgtatattaatgaaaataatgagagctacctgaaagctcagtttgaaaaattatctcaacgtgatatgaagaagtacctgggagagatgaagcgtctggctgatgggggagaaatgaattttgatggctatctggataagatgtcacatctggtgaatgaaggaacgctcgatcctgatattttaagcaaaatgcgagatgctgcaccacaattaattagcttcgcgaagtcgtttgacccaacctcaaaggaagagattaaaatacttacagacacttctaaattaatttatgatttgttcggggttaaatcggagaaataatatgtgaagttcttcgatagtatggaaggcattatataaaaggacccaatatttattgggttcttttttctctatcaatgctattagcagggagatatatcaccagagtttaatgtgtgattttttatttatcgtcgaacctggattgtttatcattggccttaacaaagttaacggctaataagattatttccatcacttcgtgagagcttcatgccttgagaggatctcaattttcttttgcaatgagacaggcgcttcctgttgttatggtatagtaccccgctattgagcctcctgaacagtgatgctgaataacataaccccatgatatatcgataaaataatctctacatttgaaaatgcacggtaattctgaaatgcaaaaaatcaaccaaaccagcgcaatgcctgaaaaaactgacgttcactggagtggtcggtttagcgttgcaccaatgctcgactggacggacagacattgccgctatttcttgcgtctgctttcccgcaatacgttgctgtatactgaaatggtaactacaggggcgattattcacggtaaaggtgattacctggcgtatagtgaagaagaacatccggtagcgttgcaactcggcggtagcgatccggcggcgctggcgcagtgtgcgaagctggcagaagcgcgtggatatgatgagatcaacctgaatgtcggctgcccgtctgaccgggtgcagaacggcatgtttggtgcgtgtctgatgggtaatgcgcagctggttgccgactgcgtgaaagcgatgcgcgatgtggtgtcgattccggtgacggtgaaaacgcgtattggcatcgacgaccaggacagctatgaatttctctgcgatttcatcaacaccgtttccggcaaaggcgagtgtgagatgttcatcatccatgcacgtaaagcctggctttcggggttaagtccgaaagaaaaccgtgagatcccgccgctcgattatccgcgtgtgtatcaactgaagcgtgactttccgcatctgacaatgtcgattaacggtggtatcaagtcgctggaagaggccaaagcacacctgcaacatatggatggcgtgatggtcgggcgcgaggcgtatcagaatccgggtattctggcggcggtagaccgggagatctttggttcctcggatatcgatgccgatccggtggcggtagtgcgcgccatgtatccgtacattgagcgtgaactcagccaggggacgtatctcggtcatattacccggcatatgttgggcttgttccagggtattcctggcgcgcggcagtggcggcgttatttaagtgaaaatgcccataaagcgggtgcagacattaatgtgctggaacacgcgctcaaactggtggcggataagcgttaacttttcaccaaaaaatagtcaaattcaccacgccctgcgcaccgtcgcggggcgttttgctgttaaatcaatagattatttttggcatgattcttgtaatgccagcaagagatttcatatttgggagtgcatcatgctggaactactttttgtgattggcttttttgtcatgctgatggtcaccggcgtttcgttgctgggcattatcgccgcgctggttgtggcgacggccattatgttcctcggcggtatgctggcattgatgattaagttgctgccgtggttactactggcgattgcggtggtgtgggttattaaggcgattaaagcaccaaaagtgccgaaatatcagcgttatgaccgctggcgttactaagggattgtgcggatgatcacaacctaaggttttatccttagaacaaaataggaattgataatcaaatctgtcactattgcgcctctaacagattcatcgtgctgtaccctacatacagccgaactataaaaagaaagggcttcccaggtggaagccctatttcttttatggaatcaacaggctggaaccttgcgttgcccggctttccagaatttcatgcgcacgctgcgcatccttcagcggatatttctgctgctcggcgacatcgaccttaatcacaccgctggcaatcaaagagaacagttcattactggcctcggttaattcctcccgcgtggtgatatagccttgcagggaagggcgtgtcacatacaacgagcctttctgattgagaatgcctaagttcacaccggtaaccgcacctgatgagttgccaaaactcaccattaagccgcggcgttgcaggcaatccagcgaccgttcccaggtgtctctgcccacggaatcgtacaccacgcgcactttcttaccgccggtgatctcttttaaccgctcgaccagattctcttcacgatagttaataacctgccacgcgcccgcttttagcgcgctctgcgctttttgcgcggttcctacggtgccgataagtttcgcgcccagggcttttgcccactggcaggcaatcaagccaacgccgccagctgctgcgtggaacaggaactgctcatcgggtttaatttcataggttttgcgcagcagataataaaccgttaagcctttcaggaaggatgccgcagcttgctcaaaagaaattgccgcaggcagaatcgccgctttatccgcaataatgttatgcacagagctgtaagcgcctaacgccgactgcgcatagactacacgatcgcctgccttaatatgctttacaccactgccgactttactcacgatgcctgctgcttcggtgcctaatccgctgggtagcgatggcggcgggtaaaggccgctgcggatatatgtgtcgataaaattgatgccgatggctttattttcgacctggatttcattctccgccggatcggcaggagtgaactctacggcttgaagtacttccgggccaccgtgcttgtgaaattcaattcgtgttgccatgtgtcctccagaacgtatcgtcagggtctgcttcatatggtaaagtttcgacccattctttatctcggtaactccattcactatggcaggaaataaacccttcaacaaacagcaggctgaaccccgcgaacgcgatccacaagttgccgggctgaaagtgcctccgcactcgatcgaagcggagcagtcggtgttgggcggtttaatgctagataacgaacgctgggatgatgtagccgagcgtgtggtagcagacgatttttacacccgcccacaccgtcatatctttactgaaatggcgcgtttgcaggaaagcggtagccctatcgatctaattactcttgcggaatcgctggaacgccaggggcaactcgatagcgtcggtggttttgcttatctggcagagctgtcaaaaaatacgccaagtgcggcgaacatcagtgcttatgctgacatcgtgcgtgaacgtgccgttgtccgtgagatgatctcggttgcgaatgagattgctgaagccggttttgatccgcaggggcgtaccagcgaagatctgctggaccttgctgaatcccgcgtctttaaaattgccgaaagtcgtgcaaacaaagacgaagggccgaagaacatcgccgatgtgctcgacgcaaccgtggcgcgtattgagcagttgtttcagcagccacacgatggcgttaccggagtaaacaccggttatgacgatctcaacaaaaaaaccgctggcttgcagccgtcggatttgatcatcgtcgccgcgcgtccgtcgatgggtaaaacaacatttgcgatgaacctcgtcgaaaacgcggcgatgttgcaggataaaccagtacttatcttctcgctggagatgccttcagaacagattatgatgcgttctctggcgtcgctgtcgcgcgttgaccagactaaaatccgtaccgggcagctcgatgatgaagactgggcgcgcatttccggcaccatgggtattttgctcgaaaaacgcaatatctatatcgatgactcctccggcctgacgccaacggaagtgcgttcccgcgcacgccgtattgcccgtgaacacggcggcatcgggcttatcatgatcgactacctgcaactgatgcgcgtaccggcgctttccgataaccgtacgctggaaattgcagaaatctctcgctcgctgaaagcactggcgaaagaactgaacgtgccggtggtggcgctgtcccagttgaaccgttctctggaacaacgtgccgacaaacgcccggtcaactccgacctgcgtgaatctggctctatcgagcaggatgcggacttgatcatgtttatctatcgtgatgaggtgtatcacgaaaacagtgatttaaaaggcatcgcggaaattattatcggtaaacaacgtaacggcccaatcgggacggtacgcctgacctttaacggtcaatggtcgcgcttcgacaactatgcggggccgcagtacgacgacgaataataattattttatgaattaggtaattaaagcaaacacttatcaaggaacacaaatgcaagcggcaactgttgtgattaaccgccgcgctctgcgacacaacctgcaacgtcttcgtgaactggcccctgccagtaaaatggttgcggtggtgaaagcgaacgcttatggtcacggtcttcttgagaccgcgcgaacgctccccgatgctgacgcctttggcgtagcccgtctcgaagaagctctgcgactgcgtgcggggggaatcaccaaacctgtactgttactcgaaggcttttttgatgccagagatctgccgacgatttctgcgcaacattttcataccgccgtgcataacgaagaacagctggctgcgctggaagaggctagcctggacgagccggttaccgtctggatgaaactcgataccggtatgcaccgtctgggcgtaaggccggaacaggctgaggcgttttatcatcgcctgacccagtgcaaaaacgttcgtcagccggtgaatatcgtcagccattttgcgcgcgcggatgaaccaaaatgtggcgcaaccgagaaacaactcgctatctttaataccttttgcgaaggcaaacctggtcaacgttccattgccgcgtcgggtggcattctgctgtggccacagtcgcattttgactgggtgcgcccgggcatcattctttatggcgtctcgccgctggaagatcgctccaccggtgccgattttggctgtcagccagtgatgtcactaacctccagcctgattgccgtgcgtgagcataaagccggagagcctgttggttatggtggaacctgggtaagcgaacgtgatacccgtcttggcgtagtcgcgatgggctatggcgatggttatccgcgcgccgcgccgtccggtacgccagtgctggtgaacggtcgcgaagtaccgattgtcgggcgcgtggcgatggatatgatctgcgtagacttaggtccacaggcgcaggacaaagccggggatccggtcattttatggggcgaaggtttgcccgtagaacgtatcgctgaaatgacgaaagtaagcgcttacgaacttattacgcgcctgacttcaagggtcgcgatgaaatacgtggattaatcgttctgtaatatttgattgtctgtgccggatgcggcgtgaatgccttatccggccaataaaatcctaaaaattcaataagttgatgttctttcatgctcttataaaggtcgtgcctctggcggatgtacgtttgtcatgagtctcactctgttgctaattgccgttcgctcctgaacatccactcgatcttcgccttcttccggtttattgtgttttaaccacctgcccgtaaacctggagaaccatcgcgtgtttcaaaaagttgacgcctacgctggcgacccgattcttacgcttatggagcgttttaaagaagaccctcgcagcgacaaagtgaatttaagtatcggtctgtactacaacgaagacggaattattccacaactgcaagccgtggcggaggcggaagcgcgcctgaatgcgcagcctcatggcgcttcgctttatttaccgatggaagggcttaactgctatcgccatgccattgcgccgctgctgtttggtgcggaccatccggtactgaaacaacagcgcgtagcaaccattcaaacccttggcggctccggggcattgaaagtgggcgcggatttcctgaaacgctacttcccggaatcaggcgtctgggtcagcgatcctacctgggaaaaccacgtagcaatattcgccggggctggattcgaagtgagtacttacccctggtatgacgaagcgactaacggcgtgcgctttaatgacctgttggcgacgctgaaaacattacctgcccgcagtattgtgttgctgcatccatgttgccacaacccaacgggtgccgatctcactaatgatcagtgggatgcggtgattgaaattctcaaagcccgcgagcttattccattcctcgatattgcctatcaaggatttggtgccggtatggaagaggatgcctacgctattcgcgccattgccagcgctggattacccgctctggtgagcaattcgttctcgaaaattttctccctttacggcgagcgcgtcggcggactttctgttatgtgtgaagatgccgaagccgctggccgcgtactggggcaattgaaagcaacagttcgccgcaactactccagcccgccgaattttggtgcgcaggtggtggctgcagtgctgaatgacgaggcattgaaagccagctggctggcggaagtagaagagatgcgtactcgcattctggcaatgcgtcaggaattggtgaaggtattaagcacagagatgccagaacgcaatttcgattatctgcttaatcagcgcggcatgttcagttataccggtttaagtgccgctcaggttgaccgactacgtgaagaatttggtgtctatctcatcgccagcggtcgcatgtgtgtcgccgggttaaatacggcaaatgtacaacgtgtggcaaaggcgtttgctgcggtgatgtaatgcaggaaagcaggctggagctacccagcctgcagtgaaattaaactgtcgtcgctttcactctttctttatagatgatttttttgatgccatcgttctacgtgagagataataaacgttgttagttcttttattgttaagcttatcccaattatctggaattccttatcctgtttttttgggtggagtaataatttctgcacatctaaccattattaaatttaataataagtatcgggtttgttacgatagaatatttctatatcctcaagaatatgctttgccttattgcctgtgactttctgagattcaattatagtatcgttaaattctaatgttaaagagaactcttttttccgctttgtgtaagtttaaccttatattgattaccaatatcaaataaaaaggtcctgtaatgagaataatcacctttaacctcctcggcaaaacagcaaagcgtgcaaatatacataaagtctttcttacccctgattttgttaactaaatcaataaatgcgtgaaaaactttacttgcaatagaacttgatacttcttctccaggtctaaaaaatcttttgcaatttttaactgtgtttctatgtataaaaagaaatctttggcataagagatatctttattatttagtgcatctagctcaacaggtaaagatgtcgttttgttgctattcacatatgatatattcatatcatcatctccatcgcgagtaataaaattaatcaccattgtagggtagggggctggtcaatcagaaatcatctttataaacttcgattgtttttgtaatgctgtatcattaagttcattaaatcgtacagcagataaatgttctatcaaatttcgctcatttgccgaggattcatcataataaacgtaaaattaatgtatccttacatcgagtaataaacattttttatacaaaaaaagacaggaacgtatttactgggttaaatataatcatcctgcttttcatcacaaaaaccgcagataatccttcctttccccggcagctggcgttatggtcagatggtttttgcaacaaatctcacaataaaaagtttcaacatactgactatttagggaaaaatatgcgcaagatcacacaggcaatcagtgccgtttgcttattgttcgctctaaacagttccgctgttgccctggcctcatctccttcaccgcttaaccctgggactaacgttgccaggcttgctgaacaggcacccattcattgggtttcggtcgcacaaattgaaaatagcctcgcagggcgtccgccaatggcggtggggtttgatatcgatgacacggtacttttttccagtccgggcttctggcgcggcaaaaaaaccttctcgccagaaagcgaagattatctgaaaaatcctgtgttctgggaaaaaatgaacaatggctgggatgaattcagcattccaaaagaggtcgctcgccagctgattgatatgcatgtacgccgcggtgacgcgatcttctttgtgactggtcgtagcccgacgaaaacagaaacggtttcaaaaacgctggcggataattttcatattcctgccaccaacatgaatccggtgatctttgcgggcgataaaccagggcaaaatacaaaatcgcaatggctgcaggataaaaatatccgaattttttatggcgattctgataatgatattaccgccgcacgcgatgtcggcgctcgtggtatccgcattctgcgcgcctccaactctacctacaaacccttgccacaagcgggtgcgtttggtgaagaggtgatcgtcaattcagaatactgacagagcgggagagcgtgatgctctcccgaatgctgtttttttaatcacacctttatcctttcgctgtcttgctgcaaactgattaagagagttttatcaaggagcagcacatgtggtatcaaaagacgctcacgcttagcgccaaatctcgtgggtttcatctggtaacggatgaaattctgaatcagctggctgatatgccgcgcgttaacatcggcttactgcatctgttgctgcaacatacctccgcctctctgacacttaatgagaactgcgatcccaccgtacgccacgacatggagcgttttttcctccgcaccgttcccgacaacggaaattatgagcatgactatgagggagcagacgatatgccttctcatatcaaatcctcaatgctgggaacatcgcttgtattgccggtgcataaagggcgtattcagaccggcacctggcaaggcatttggctgggggaacatcgcatccacggcggatcgcgtcgcatcatcgcgacactacaaggggagtaaaaaatgaccatttcggagttgctacaatattgcatggcaaaaccaggcgcagaacagagcgtgcataatgactggaaagcgacgcagatcaaagtggaagatgtactgtttgcgatggtgaaagaagtagaaaatcgcccagctgtttcgctgaaaaccagcccggagctggcggagctgctacgtcagcagcacagcgatgtgcgtccaagccgccatctgaataaagcgcactggagcaccgtgtatctcgacggttcgctgccagattcgcaaatctattatctggtggatgcgtcttatcagcaggcggtgaatttactgccggaagaaaaacgtaaattgctggtgcaactctgaaaggaaaaggccgctcagaaagcggccttaacgattacagcatcggcttaaggaagcgtgccgtgtgtgatgcttcgcactccgcgacggtttctggcgtaccggagacgaggatctcgccgccaccactgccgccttctggtcccaggtcgacaatccagtcagcggttttgatcacgtcgagattgtgctcaatcaccacaatggtgttgccctgatcgcgcagtttatgcagtacgtcgagcagttgctgaatatcggcgaagtgcagaccggtggtcggctcgtcgagaatatacagcgtctgcccggtgccgcgttttgacagttcacgcgccagcttcacgcgctgggcttcaccgcctgaaagggtggttgcggactgccccagtcgaatgtacgtcaggccaacgtccatcaacgtttgcagcttacgcgccagtgcaggtacggcatcaaagaactcacgcgcctcttcgatggtcatatccagcacttcgtggatggttttgcctttgtacttaatctccagcgtttcacggttatagcgtttacctttgcactggtcgcacggcacgtagatatccggcaggaagtgcatctccactttgatcacgccatcgccctgacaggcctcgcagcgtccgccacgaacgttaaagctgaaacgtcccggcgtatagccgcgcgcacgggattccggtacgcccgcaaacagttcgcgcacaggcgtaaacacgccggtataggtcgccgggttagaacgtggagtacgaccaattgggctttggtcgatatcgatcactttatcgaaatgctccagcccctgaatatcgcgatacggtgctggttcggcgatggtcgccccattcaactggcgttgggcaatcgggaacagtgtgtcgttaatcagcgtcgatttaccggaacctgaaaccccggtgatgcaggtaaacagacccaccggcagcgtcagcgtcacgtccttcaggttgttgccgcgtgcgcctgtcagcttcagcactttttccggattcgccggaacgcgtttcttcggcacttcaatcttgcgtttgccgctcatgtactgcccggtcaacgactccggcaccgccataatcgcttccagcggaccttctgcgaccacttcaccgccgtgaacacctgcgcccgggccaatgtcgatcacatggtcagcggcgcgaattgcgtcttcgtcgtgctccaccacaatcacggtattaccgagatcgcgcagatggataagcgtacccaacaggcgctcgttatcacgctggtgcaggccgatagacggctcgtccagcacgtacataacgccaaccaggcccgcaccaatctggctcgccagacggatacgctgtgcttcaccgccagaaagcgtttctgccgagcgggaaagcgtcaggtaattcaggccgacgttaacgaggaatttcagacgatcgccgatctctttaaggattttttctgcaatcttcgcccgctgacctgcgagtttgagattgttgaagaattccatcgcatgaccaatgctcatgtcggagatagcaggcagcggcgtattctcgacatacacgtggcgcgcttcccgacgcagacgcgtcccttcgcagctggcgcacggacgattactgataaacttggctaattcttcgcgtaccgcgctggattccgtctctttatagcggcgctccatattatgcagcacgccttcgaacggatgacgacgaatggaggtatcgccacgatcgttcatgtatttgaattcaatgttttctttgccagaaccgtacaacaccactttatgcacgttcgcgctcaggctgccccacggcgcttcgacgtcgaacttatagtgatctgccagcgatttcagcatctggaaataatagaagttgcggcgatcccagccacggatcgcaccaccagccagcgacagttccggattctggatcactcgatcaggatcgaaatattgctgtacgccaaggccgtcgcaggtcgggcaggcccccgccgggttgttaaacgaaaacagtcgcggctccagttcacgcatactgtagccgcaaattgggcaggcgaagttggcggagaacagcagctcttccgctttcgggtcgtccatatccgccactaccgcggtaccaccggaaagctccagcgcggtttcaaatgactcggcaagacgttgggtaagatcgtcacgcaccttgaagcgatcaaccaccacttcaatggtatgtttcttttgcagttccagttttggcggatcggaaagatcgcagacttcgccatcaatacgagcacggatgtagccctggcttgccaggttctccagcgttttggtgtgttcgcctttgcgctctttaatgattggcgcgagtagcatcagacgcttgccttccggctgcgacagcacgttatccaccatctggctgacggtttgcgccgccagcgggacgtcgtggtccggacagcgcggctcgccaacgcgggcgaataacaaacgcaaatagtcgtggatttcggtgattgtccccaccgtagaacgcgggttatgagacgtcgatttctgctcaattgagatggcaggagaaagcccctcaatatgatcgacgtccggcttttccatcagtgacagaaactgccgcgcgtaggcggaaagggattcaacgtaacggcgctgcccttcggcatataaggtgtcgaaagcgagcgaggatttgccagaacccgaaagcccggtcacgacaatgagcttgtcgcgggggataacgaggttgatgtttttgagattatgggtgcgggcgccccgaacttcgatcttatccattcacctttcccggattaaacgcttttttgcccggtggcatggtgctaccggcgatcacaaacggttaattatgacacaaattgacctgaatgaatatacagtattggaatgcattacccggagtgttgtgtaacaatgtctggccaggtttgtttcccggaaccgaggtcacaacatagtaaaagcgctattggtaatggtacaatcgcgcgtttacacttattcagaacgatttttttcaggagacacgaacatggccagcagaggcgtaaacaaggttattctcgttggtaatctgggtcaggacccggaagtacgctacatgccaaatggtggcgcagttgccaacattacgctggctacttccgaatcctggcgtgataaagcgaccggcgagatgaaagaacagactgaatggcaccgcgttgtgctgttcggcaaactggcagaagtggcgagcgaatatctgcgtaaaggttctcaggtttatatcgaaggtcagctgcgtacccgtaaatggaccgatcaatccggtcaggatcgctacaccacagaagtcgtggtgaacgttggcggcaccatgcagatgctgggtggtcgtcagggtggtggcgctccggcaggtggcaatatcggtggtggtcagccgcagggcggttggggtcagcctcagcagccgcagggtggcaatcagttcagcggcggcgcgcagtctcgcccgcagcagtccgctccggcagcgccgtctaacgagccgccgatggactttgatgatgacattccgttctagccctgataaatatttaaatgtaaatttatttacagatttatctaaataaataaccaattaaattagtgtgttataagcattctagccctcttttttctgtaaagttaaaagagggctttttattgtccgaaggttgtgtaattataaaagttcgcttataaaattaaatgtaaacataaaagttctttggtgactaaagtgtaaataaaggggtgtttgtgagagttgaaaccgttgtacacagttctggtgatctattaccaatacttctagatgatgatggtttaccaatcccgtctcctaacgagtttgtgatgggaagacgaaacttaagcacaaataccctcattagaaaccttcgtgagctgtctgttttgtatcgatggttcaacgttcatcggatcgacatgcactcgagactaaaaaacggtgcgcttttctcggaagctgaatttagaggaagcttgctagagtttttgagaaaagacatggagatcgaaagcaaggttgttgccccgcatacgtttaatagtcgattagccacaatacgccagtatttcgtctgggagattgatgtctatttgtcgtctctaccatcgaatgatagccagtatgactcgatacaagagtctagaaagcgaatcatcgcgtggattgagaaaggttttattaatagtccaaagagtgctggtattagccgaaaagctttgacagaggctgaagccagattcttagttaattgtctcaaccctgagagcgctgactctttcgctttttacgagccgattaagtatcgaaactttgtcgcagtatcattgatgcttaactgtggactccgtccaggggagcttcttagtcttcgggttgaagatattaatattggggcaatttcgtcggtaactattcaacgaagaccacccgatccaaatgacgagagaaggcccagacccagtgttaagcgcagtggtcgagtattgccgcttgagggtagccactttctacggatgttagacagatacattgtcgaaatgagggagagcctagaatctaaatcgagtaaatctagtgattatttgatcttaagtgatgaaggcaacccgttgtcccattcatcactgacacaactttttactcgtctaaggagtgcatatccggactacttgccagaaatactgactccgaaagcattgcggcatacattctcgactcgaatggaaagggcattgcgagaggcagggcttgaagaggaccgtagaaagcaagctttggcaatgttacgtggcgactcaagtttagagtctcaaacggtttatattgctcaagaaattgaagatcgggctcggcaagcattatctgattaccaaaagaaactgacaatgggaagcgatagatgaaccagttgcttcaacaagctagagataataatgattctaggctgaatttacctgatactttttttactcgtgagggtgttaaggttgagagtgctggagatgtttgggtgttgcccttgctatatcgacacagtcggctcgacttctctcgcatccaaagcggtactcttaaagttgtagtaaaaagctgtattatcgatcaagcgacgcgagtgtcatcgcacgctggagtgcaatattggagtgatatatctgccgcaattttctcgaaacagaccgattattccctcgtctccgatctttccattgatgatcttgaattacgtttaattgcggtgatggaagccgcaataaatgaagctcgtaaaaggcaccgcctttgggcattgtatagaccaatacagtggtatatttggtgcgcggaaaactacccagaatttgggttttcggagatttatgctcacgagttagaagcgatggaaattccgggaaatccaaaaggggaggcagttagacaagaagatcctgatagaggacctcttcatagaactcttgagcttcaactcataatcaatacgttaaagcaagacaacagtatggagtatgagcacctgcaacagaaggcggctatagctctttcaattgctttcggaagaaatccagctaacctaacttttctaaaagaaacggacttaattaacctgacgcctgattccgattcaccttgctatattttacgaatgcccagaattaaaaagaggcaactagcgccaagagacgatatggtggatgaatatttggaaccggatattgccaaacacctagtggcgcttatcaacgcttcgcaacataaaaagctagtggttgatgctgatggaagtgttagggaaatcgagagacctttgtttattaaaccaaccgaaaattcttatgcattagagtcgaagcgttgggatgacgccttcaatatgatgtcgacaggtatagctaatctcatcagaggctttatcaaacgacacaatctaatttccccacttaccggtgaattgatgcacgttaccccccgaagactgcggtatacgcttgcgacagggttagcagttgagggaattagcaagcgtgagctggcgaggattctcgatcatacggatacccagcatgtgcaggtctattttgaaatggctggcagaattgttgagcaccttgataaggcaaccacaaaagccttgtctaattacctaaactttttcaaaggtaaagtagtcgatagcgatattgaggctgtcaatggtgatcgtgacgacaaacacctaatctttgttgacgaacaaaatccgacggtacagtccgatatcggcgtttgtggagaatctagcgtttgccacctcgacccaccatactcttgctatttatgccctaaatttcagccctatcgacatgccgatcatgagcaggtgttggattgcctattggcgagtcggacagagcgacttgaaaaatacgaaaatgctcgcctagggattcaactcgacgaagtgatatcggcggtagcacaagttgtgaaaatctgcgaagagggccaagagaatgtctgatggtcgctcgcaacgcagagccaaagttattccctttattgatcgtttagaacgcgatcggaatgcaaatttacaagccctagtcagcaaagcccagcttttgaagttagatggtttcgagtcggttaaatggcatgaatcgaattggaagataacatctggcagacttgtgaagctgactggaaaaaatatcaaagcagcgtcttttgcctttaccttatcaccaaaattaggcgccgagtctctagtggatagttggagtgaagtgtgtaaggcgttattcgttttaagatttcatagaaaacatcagtcaacgcccaatcagcgtaacttcataacagcagtcggttatgttgccgcggctgcaactcaattgggtcagaaactactcaacctgactcccgaagcacttgataatgcatgcgcgttaatttcaaaacattaccgcgaggcgaccgcatataacctccataaacatattgcagagttcgcagcgcattgcgatgccaacggtttgtgccgggttctgttgcaatttaaatacgcgcgaatgaagcgcccagcgagcacgggcggtttaagccacaagcggcttgatgatccaggggttattgagaccaaatcggacaaattggttgatccaaaagtattccgtgtaatgggagagctttatcaaaatgtaccgaaaattcataaataccggctgtatgttttgttattgactttgcttgcgtgcacggggcgacggtttagtgaggtttcacttttaccaaatcaaacactgtctgttgatgacgaagggaacggttatatcgagtacttcccgcgtaaaacaagtcgaggagatgtatttactccgaaacgcaaattgtacctaccatcagaggtgaaacctatcgttgaagaagtgctcaacgaattagcagatctcaccgctgcggctcgcgagacggcagaagagatgcataaaacacgtgggccggatttacgctttttggagcaaattccgagtgaacagcggctctatgctagcgatataaaggaattagggattagtgatacaggattaacgtcaacgggttggcttcgtaaacaaaacctagcttggccagacgtcgatgcgcgaaccaaacaagggcaacgcccacgaaaccccattcatttcacgaataaggaaggtttgaaaaagtactgtgcccgtgatttttcgggtgcctgtctctcggccattcataccgatcaattcggtaaagaatattacctgaaagatttacttttcctccgtccactcggcctttcgagtggcacttatgctcattggcttgcgaccagttgcagccagtcaatgttttcgacattccttcgctatttccctgacctcgcggcggaatatgcatctgctagtgtcgaggtggatttcaccagtcaccattttcgacacacactcaataccttgcttgatgaaggcggtttgagtgatctactgcagacggaatggtttggtaggacgaattcacgagacacaaaagcgtatcagcatacgtcacgagaaaagagagcccttatgttacgccaagacatcaagaaagggctcgtgggcggacaaataacggatcaaattcaagccgttccggttgacgttcaggatgctttccttaaagcaagggttcaggcggtgcatgatgtcggtactggtatttgtatccataatttctcgcaaacaccttgtgagcgccatttgcaatgctcagcagactgcaaggattatgtgtgggcgaaaggcgatgctggtcgattagaagacttaaaacggcaatatgcactcacggcaattgctcgcaaaaacgctgaacagaaaatgagtagtcaaaagccaaagaaaagtgccgactggcttgcgcacaatgataaaaaacttaaaaccctaaaaagccaattagcgggcaatggggttgagcattttgaccctgagcaatatctaatagaggtgaaacatggctaagcgttttagacgtatgtcggatagtgatatcaataccattgttgctgatttagatcgctgggctatgggcgagcttggctccaagttaacttgggcagtgctggaagagcgtttcgggtttagtcgccaatcacttcaagcaaaatcagaaattaaagcagcctatgacaacgccaaaagagcattgtcaggtggcttggttaaaacaaaagaacaagcaaccaaagaggccgaacagctacaggtggagctagcacgccttagaacagagctggaagcatacaagcaacgtgaagagctgtggcagcgccgctggcagcaaatagcctttcatgtaaggcaaaagggtatacaaatggcaagtgtcgataaaactccacctgaaggtgcagatttaccgtcaaatatcgagtcagccaaaattctgaaaatgtttgataaggaaataccgccttcgggccgtgtttagctcaagggtaactctactcactggattggaggcgatatgaacttggctggaaagatttcagggctgtcaggtgatgctgacgtgttattcggtggcgagtcctataatgcatcggtgagagtgtcttcgcgtattgatcaagtatatgacttccatatcctagttgaggggttgccggaatttttggcgttcgggctagtagccgatcactcaagcttcgttgctaggcttgattttgaaagggaagtcgagcttcgcgcatataaattaaagggtggtgttctctggtgtaagccggtaatgactccaacttactgatagtgttttatgttcagataatgcccgatgacctggagcacctcaaaaacaccatcatacactaaatcagtaagttggcagcatcacctttatgcgtgtgttttcacaaaacagattttccgttccgctgccatttttcattttcattgatatctaaggcaacaaaaaatggagagccgaatcatgtctacgatgaatgttttaatttgccagcagccgaaagaattagtctggaaacaacgcgagatacctattccgggtgacaatgaagcattaataaaaattaagtctgtcgggatttgcggtaccgatattcatgcctggggtggaaatcaaccattttttagttatccacgtgttttaggccatgaaatatgtggggagattgttgggttgggtaaaaatattgctgatcttaaaaatggtcagcaagttgctgtgatcccttatgttgcctgtcagcaatgcccggcgtgtaaaagcgggcgtaccaattgctgtgaaaaaatttcagtcattggcgtgcatcaggatggcggttttagtgagtatttgagcgtgccggtggcgaacattttgcccgcagacggtattgacccgcaggcggcagcattgattgaacctttcgctattagcgctcatgcggtgcgtcgcgcagccattgctcccggcgagcaggtgctggtggtcggggcggggccaatcggtctgggcgcggcggcaatcgctaaagccgatggcgcacaggtggtggtggcggataccagtccggcgcgccgtgaacatgtggcaacgcgtctggaattacctttactggacccgtcagccgaagattttgacgcgcagctacgggcgcagtttggtggttcgctggcgcagaaagtgatcgacgcgacaggtaatcaacatgcgatgaataacaccgtgaatttgattcgtcacggcggcacggtggtatttgtcggcctgtttaaaggtgagttgcagttctccgatccggaattccataaaaaagaaacgacgatgatgggtagccgcaacgccacgccggaagattttgctaaagtcggtcgactgatggcggaaggaaaaatcactgctgacatgatgttaacccatcgctatccgttcgccacgctggcagaaacctacgagcgcgatgtgattaacaatcgtgagttgattaagggtgtaattactttctgataaggcgagattattaaagttgccatgcagcgtccggggaagtgttgggcgctgtttttttctgtttcttaataatgtgttgtaagccgtagaaggcgtgtaggtcgcaccctatgcgacctacacatcagtcaggaattacccttcacgttctaccactttaatttccaccatgccgatcccgagcttacgcggcgagtgtccgaggatattcccttcgttggttgagacaggttccggcggcacaattaccagtgtgtcggcatcggttgggttatcgaaatgcagtgtggtggtggtcacttcattgcccagcacaagagtttgttcttcattgcctacgcgtaccggaataggacggctggcgttattgccgtatgctttggcggtaatcaccaggtcaaatttcttcggcagcggatgcttgtactcgatttttacttcatcgcccagctgcgcgttggaccagcggccccacgactccggacgggaaatcccgctaaactgtttcacctcttctggcgcaccggcgacgttaaagatgaaactgtcggctttgtagcgaatatcgttatcaacaatcttcagcgtatcgacattgcctttgtaacgcgccatgtcgatgaccgtatctttaaatgccgttttgccctgccatgttgttttgtcaacatgctgaacaatttgctgaccgccaagctgcccttgcgagacacaccagtcggtggaaagtgccagttccggagcccagagttgtgccatcttgtagcaacggtcaacccagacgaaattgtcgcgtggagcgaaatcggccagctggaaacgcagcggtgctgagtattcgctttccggcagcggttccacgcgtttgtctgaaacccgcaacagcagcggcaaacggaaatggctacccgagaaggcaatcatgtttttctgctggtcgatggtgaactctttcatctctttagggaatttccacaggcggatgatatctggcttccacgccaatgttttctctttgatattgaggaagatttccgacatcgactgcccggataaactgctacgaccaagtccgagatagttatcgccaccgagaatgtccagcaccgtcgcgccgttatccatcgtgttacgcttcactgccagcgtctcttgctgcggcttgtcgccacgaatgacaaaaaacaggttattgcgatcctgcttattgaggtatttccacgccgtgttgttcatcgctaaatggtcagaagagacgacgatgacggtatctttaaaccacggtgacgctttgattttgttgataaacgtcgcgatgttctcctggctgcaacttaccgcgctgaatgactgattcggtttaccgtcaaaatcatattttttgcggttacaggtacgagagataaaaccatccgggtgatgggtatcgactgtcagggtaaacagtgagaatcgctgacctgagcgggaaagctcttcaaactttttccacgcttcatcgagaacggtatcgtcgtagaatccccagtcgttgcgatagtgcgggtcggctaccacgcttttcagctcttctgagccgtataagtggtcgaagccatgcgacttcaggaacacatctttaccggcaaaacgcagattcgcgccctgcacgaaatagttctgataacccgagtttttcaggatatctcccagacagatgttctgcgggaagaagctggagacagaggcggaggcgttgccttcaaagggggcaaacagcggtatgccgcactgagaagccaccatgcccgcaatcgtgtaatctgttcccggcagctgctgcgtgtggctgaaatccaggccttcatttttcaacgcgcccagttcaggcgtgagatccgggaaagcctcgttatcaaaataggtccgctcgagactttcgccgtagatataaaccaggttgagtttcgggtcagggatagttttcgacggctctttataataagccgcaaagtccgggtcgccgtcgcgtgactgggatttcaccagttccgttatctgacgaaatgccgggctggcgtccaccgaacccagcgccagtaagagcgccagcaggctgtaaccaaaatggtgcggatgatggcgacgacggcgcaggatccagcccagcgcaccgaacaccgctgtcagccccagcacaatgccgatacccggcaaaatgtatttgctgacgccagcaccggtcaggctgttggttaaggtatagagaaccgcgtcgttaataccatcgccagtaaaatagtcgctggcaaacagggtgatatttaaaacgacaaatagccccagcaccgttaacgtggctgcaaaccaccaggtgttacgtcccgctttccatgcgtaaatcagcacagaggcgagaaaaagggcgaaagagagtagttctgacaacgggcgatcctcactaaaccgggccgtttagccaacgtttaagctttttgagaagcacaatgtaatggcgtcgccatattgctgcaattctagtgtcaaaaaaatgcgatgttgttaggaattagtttataaacagacttttttgattacggtcacttcccgtgtaacaggggtaaaaccgtccaggagcagggaaaagggcaggagagagccgcgtcagccgggtaacagctaaaacgcggcgtttcgcggttcaggaaatgaagttcagcccctgttttaacaccagatcgcaggctttggttttcaccttttctgccagcggagttgttccgatgttatccagattgagttgctgaccatctttggttttcagcaaaccctgaatgccgtccagatagttggtgtcttctttttgctcttcactgttcaggcccagcttttccagcacctggttcttgatgttttcggcatcggttaccgacgccagcttttgcttcgcgcagtattgcagaatgcctgcggcattgttcatgttatctgcgcttaaggcctggtttccgctgctaagcaagttagttaatgacgcgagcgaccaaccgccttcctgtgtcgtgctgttttggttgccaagttcgctggcggcgctggagagcgcatctttccaggacgcagcatgcaccccggtggaaattaatgcgctggcggcaatggcacagcacagaagatgtttaacagttttcatcatcattactcaaggtggaattgtgtcgcagtataccgccagaaacggggattaatactctttacctgttacccggctacggtagctatcccagttgaagatcacccacaaactgttacccaggcgcatacggtccatcacgcgttcgcccagcaacttggtcatctcttccatattactgttggtcagcatcccggttgggcgtttggaagaagagcggcgatcgacgatctggttgatgatcactttttcgtatttcgattcggtctgcacgccgatctcatcgatcaccagcagatcaacgttgctcagatcgttaagcagttgttcttcgctggtaccgctattcctgaaggtatctttcatcgccgacataatatcggccacggtgatgatcaatacggatttaccgcgtagcagcagctcgttgcagattgccgccgccagatggtttttgccggttcctggcttaccagaaaagatgaagctggcgatgttgccgtcaaactcttcgacatactggcgcgctttgcttaacgcattcatctgcccttcacactcaacgcgatagttctcaaaggaacagttctgatgcagtggacgaataccggagcggttaaaggtgcgctgcattttcatcgcccgattttcacgttcgagagcggcggagcggatcgctccttgttctttttgccaggccagtagttcttcacccgttttgaatgcgggtttgatatgggcaggcatcattttttgcaggcgttgcatcaggtcgccaacgtttttcatcgttaccctctgaatcctggtggaatttggctgtcaggttcgctgaccgtattcacatctcgtttcggcagtccgccgttgctggcacgaccgatttgcaggctgcgcgccagtttttgttgccactgcacatggtgaaagactttaccttccgcctgccagtaggcaatgaatgaggccagttcttcggtggtcaccggctctcttagcgccacgccccatagcgccgccaggcggataaaatcggcatcgggttgccagtccggatacatggcgaatttccccatgggtacagcaacgggagcggcttgcggttcctgatagagttgatcgtccagagcgacatcgcttcccggacgcgccagcttttcttccagcgccagcagttcagccaggcgtgcaggcgtgacggcataaaacgccggggcattgttagcaaatacggcaaccacaccgccttcagcttttgccagaacggtttggtgatcgtgtaccagggcgtcaataccaacgacgtccggggtcaaaactctggaagacatactgtttctcaaatatggaacgatgaacgagaagggagataacttttatagtaacacacggaggagaggaggctgtctctcatccgtgtgcttaagcgaggcaattttatacgcgagggcgcttgcggtacaaccataatccaggaatggaaagaccgatggataacgcaccaacaatcgatgaagctgtaagaaagttggttaacagggtaatcatcaacggttcgctgtaacctaactggctgatttttaccgccgaaatcattgcggtataagccgatatgcccgggaacatagggataacggccgccacggtaaacactttcggatgcgccagataccagcgcgaccattgaataccaatggtaccgaccagcatagaagccataaaggttgaccactcaatattcaacccgctggtcatcaagatcattcgggaaccatgacctatcgagccaagcagcgcacaccagcgtaacgcccgcacgggaacgttgaacaccatcgcaaagccgaccgcaggaatggcggcgaggatcatatcctgcgccaacgctaacagaaattcgatcacacccatccgcgtagcccccaaatcgtcagtgccatcactacgccgacgcaggtagccagtgtcagcagactggcgatcgcccagcgtgccagtccggtattgatgtggcctttaaacatatcggcgacggcattaatcaacggaaagcccggcactagcagcagaacgctggcggccatcgcaatggtgggggtattgctgaaagtggggagttgcaaaagcaatccggaaatggtggtggcggcgaaagcggtaaggcaaaagttgatctgtggatgaagatgacgttgtgccagcagctggcggatatacatcgcggtcgtactggcaaagaaggtgatgacggcaccatcccagccaccgttattgagtttacagaaacaggcgcaagaaaggccaaccattaaggctaccagccatcttgggtaacgtaatggctgaatttggctaaatcgtttctctacgcctttgtaatccagcagatgatgctccgcaagaatcacaatgtgctggacttcagtcaccacatgcatattaatgccgcgatcgtgatttttacgtgtcgatgtcaggcattgcccatctttaatagttgtcagcactatggcgttcgaagagatagaactttcgacgctgtccattcccagtgcccgacccagtcgtgaggaaagctcatcaaccaacgcgctttccgcaccatgttgcaaaagaaataatccacactggatacaaagccgtgttacggctcgctgttgctcagtttgcataactcgccctttgtcatagacgtgctgcgtattgttcagataatgagaatccatttgtatcatgaagcacggttgttttgcggtaggttaagatcaaaattgcgctgattaatcctggttatcgggagaagctcggtgataaaaagcgaattatctctcgccgcaaacaaactatcacatgaatattatcatcataatgaatttattgtttggcctttacgaatcaggataatagataaccgggcacgttttttaatgttaacaagctaaaaccatcagatttcattgaataaatattggttgtgtgattttgcattctgcgggaagggatatcatttaattataaattaaatgaatgtgatttctgtttttcattaagtattcctaacaacttaatgtagatattttaaatgtctccaggctatttcaccaggttatcatttgatgctaaccttctgacacatgcagtggagttgttgtgcagtaggagtatgctgatatgaaagtgaatgctaaggataatttattcgcttaatctattaatttgctggaaacatttaaggaatgaatatcctgaataaaccatcataatttttagacagtggatgtggaggaaatatgttgccaggatgctgcaaaaatggaattgttatcagtaaaatacctgttatgcaagcagggttaaaagaggtcatgaggactcacttccctgaatatgaaataatatccagcgcctctgcggaggaccttaccttattacaattacgtcgttccggattagtcattgctgatttagccggtgaaagtgaagatccacgttctgtttgtgaacattattattctttaatctcacaatatcgggaaattcactgggttttcatggtgtcacgctcctggtattcccaggcagtagaactgctcatgtgccctacggcgacgttattgtctgatgttgaacccattgagaatctggtcaagaccgtacgttccggcaatacgcacgcagagcgtatcagcgccatgctgacctccccggcaatgactgaaactcatgattttagctatcgctccgtcattctcactctttcagagcgcaaggtactgcggctattaggtaaaggatggggcatcaaccagatagcttcattgcttaagaaaagtaataaaactatcagcgcccaaaaaaacagtgcgatgcgtcgactggcaattcacagcaacgctgaaatgtatgcatggataaatagcgcgcagggtgcaagagaacttaacttgccttctgtttatggagatgccgcagaatggaacacagccgaattaagaagagaaatgtcgcactcatagaaaaatgcgtcatgagtagtatcggtattgagagtttattcagaaagtttgcgggtaacccttataagctccatacctataccagtcaggagtcatttcaggatgccatgtcgcggatctcgtttgcggcggtcattttttctttttctgccatgagaagtgagcgcagagagggattatcttgcctgactgaactggcgattaagtttccgcgtacccggcgtttagttattgcggatgatgatattgaagctcggctgattggttcattgtcgccatcaccgctggacggtgtattaagtaaagcgtcaacgctggagatttttcatcaggaactctttttgtcattaaatggtgtacgtcaggcgaccgaccgactgaacaatcagtggtacattaaccaaagccggacgttaagcccgacggagagagaaatattgcgctttatgtcgcgtggctactcaatgacacaaattgccgagcagcttaaacgcaatatcaaaacgatccgtgcacataaatttaatgtgatgtcgaaactgggcgtcagttctgacgcagggttgttggaggccgcagatattctgttatgtatgcggcattgcgaaacaagtaatgtgttgcatccctattaatccgcatgatgccgggtttacttccccggcagtgctttcatttcagcgtacaatcgccacattgctgcacatccggtaagcgataacgctggcagcaagtgcggcgcaccagcaggccgtcgcgcagtaccacggtacgccagagtggattatcttcaccgttcgtgagcgttttctcaaaaaagagggcatggcgcagcgattcaacagtagcctcgccgagcagttgcttcatctcagtgagataccagttgatcaaataaccggtattactccagataagtttgccgttgatctctccggtcgcttctagtgcttgcacaaccggaaccagcgcctggctgattaacgtttccattcgatgctgcggcgaatgtggtgttgcgtttttatcttcacacacatcgacccagaaacaggcgacgcgtccggtttcgtgaaactcagcatggaaatgttccggcgacacatctaatgccttttcctgcgtcagtagcgccagcattaatggtggcaccatcaggccgatataccattgtgcccatagtgagatcagcggtttgttctcgcggatcatcatcggttggttgcgatagatatgatcggaatagaccgccagcagagaacttagcacattcggtgatgaccattgcgccagcgtcatggcgttaagtggggcaggttcatccaggcggataaactccagcaaatgttcacgatgttttgcgatcgtcgcccgcacggcttgcgcaagcgtgggatcctgcggctggagatgcgttcgccagatgacatcttcatagagcggtgcggaacgataggccataatcgggatagtaatctaaatgataatgattgctaatcctagcgataggtttacccgatagcaagggatttatctggcttgcaaatgataaaaattatcatatgatattggttatcattatcaatgaaagagatgaaatcatgttgcaacgtacgctgggcagtggctggggagtgttgctgccgggattgctgattgcagggctgatgtatgcggatttatcgtcagatcagtggcggattgtcattctgatgggattagtattgacgccgatgatgctgtatcacaaacagttgcggcattacattttgctaccatcgtgcctggcacttattgctggcatcatgctgatgataatgaatttgaatcagggatgaaaaatcaaggaagaaacaagaaaggaagtaaagataattggtgcgaggggggggacttgaacccccacgtccgtaaggacactaacacctgaagctagcgcgtctaccaattccgccaccttcgcacagtcatcttactttttttgatatcgcctcgtttggtgcgaggggggggacttgaacccccacgtccgtaagaacactaacacctgaagctagcgcgtctaccaattccgccaccttcgcccagtgcgagcaatatcaacgtggtttttggtgcgaggggggggacttgaacccccacgtccgtaaggacactaacacctgaagctagcgcgtctaccaattccgccaccttcgcataccatcaattcttaaaaagaattgctaccacggaggcgcattctagtggttttcagcttttcgtcaatagttaattatcgacagaggtgtaattgctggaaaaatgtccatcaggaaactagcgtgtaggtttggtatgcatgcgggggcagatgccagatgcgacgctggcgcgtcttatctggcctacgaagggctaacgtgcaggttttgtaggtcggataaggcgttcacgccgcatccgacacggtattcggcgagataattaacctttcttcgcctggcgggtcataatggcgcgatacaccttgaagcgcccggtttgcgcgatcacttcatggaagccaaatgtctcatccagcacgtccggataaggcaggaaggcgttcgctacaattcgcagctcgccgccgctgttaaggtgacgcaccgcgccgcgaatcagcgtttgcgccgcatcgaggctggtttgcatcccatcgtggaacggcgggttggagatgatcatatcaaaacgacctttcacctcggaaaagacgttactggcaaagacttcaccttcaacaccgttggccgcaagtgttgcgcggctggcttctaccgctggcgcagagacatcgcacagagtgagacgaattttcggtgaatggcgcgcaaaggcaaccgaaagcacgcccgcgccgctgccgacatccagcactttacctttcgtgtgcggagttaacgtcgagagcagcaactggctaccgacatccagaccgtcgcggctaaacacgccaggcagcgttttgaccgtcaggccatcgacgctgtattcgccccagaatttatcggcatcaaataccggctgtttttccagacgaccaaaatagaggccacagcgacgggcgctgtcgactttattcaacggcgcataatctgccagcatctgttcggcgctgcgcacgccgctgcggttctcgccaacgacaaaaatatccgtccccaccggcagcagagaaagtaaattcatcaactggaactgggcttccggtttgttcttcggccagtagtaaatcaaagtatcgcaatctgcgacgtcatccgccgtggcgaccagactaaaacgggcgttatcacccatctggcggcttaacacctgccagtggtggaattgctgggtatgagcacggctggccgcggtatctaaacgcgcgggcaggtcatcctgtaagtctccggcaaaaagaatacggctttgttcgaaatcatcactgtgacgcagcaagacttcacttgccggggtaaatgcagacatggaatgctcctcaattgatactggcggcgattatagccatatgttggcgcggtatcgacgaatttgctatatttgcgcccctgacaacaggagcgattcgctatgacatcccgacgagactggcagttacagcaactgggcattacccagtggtcgctgcgtcgccctggcgcgttgcagggggagattgccattgcgatcccggcacacgtccgtctggtgatggtggcaaacgatcttcccgccctgactgatcctttagtgagcgatgttctgcgcgcattaaccgtcagccccgaccaggtgctgcaactgacgccagaaaaaatcgcgatgctgccgcaaggcagtcactgcaacagttggcggttgggtactgacgaaccgctatcactggaaggcgctcaggtggcatcaccggcgctcaccgatttacgggcaaacccaacggcacgcgccgcgttatggcaacaaatttgcacatatgaacacgatttcttccctcgaaacgactgatttaccggcggcttaccacattgaacaacgcgcccacgcctttccgtggagtgaaaaaacgtttgccagcaaccagggcgagcgttatctcaactttcagttaacgcaaaacggcaaaatggcggcgtttgcgattacgcaagtggtgctggatgaagctacattgttcaatattgcggtcgatcctgactatcagcgtcagggattgggaagggcgctgctggaacatctgatcgacgaactggaaaaacgcggcgtggcgacactatggctggaagtccgtgcttcaaacgctgccgccattgccctgtacgaaagtttaggctttaacgaggcgacgattcgccgcaattactaccccaccacggacggtcgcgaagacgccatcatcatggcgttgccaatcagtatgtaatacaaggtggaataatgaagtgggactggattttctttgatgccgatgaaacgctgtttacctttgactcattcaccggcctgcagcggatgtttcttgattacagcgtcacctttaccgctgaagattttcaggactatcaggccgttaacaagccactgtgggtggattatcaaaacggcgcgatcacttcattacagcttcagcacgggcggtttgagagctgggccgaacggctgaacgtcgagccaggtaaactcaacgaagcctttattaatgcgatggcggaaatctgcacgccgctgccgggcgcggtttctctgcttaacgccattcgtggcaacgccaaaatcggcatcatcaccaacggctttagtgccttgcaacaggtgcgtctggaacgcacgggcctgcgtgattacttcgatttgctggtgatttccgaagaagttggcgttgccaaaccgaataagaaaattttcgattatgcgctggaacaggcgggcaatcctgaccgttcacgcgtgctgatggttggcgacactgccgagtccgatattctcggtggcatcaacgccgggcttgcgacctgctggctgaatgcgcaccatcgcgagcaaccagaaggcatcgcgcccacctggaccgtttcttcgttgcacgaactggagcagctcctgtgtaaacactgattgcctcccccccgttgatgggtaaaatagccgcaatttttcgttttcaacaagcgcggcgcgatgccgcttactcaagaagaaagaattatgacgttgtctccttatttgcaagaggtggcgaagcgccgcacttttgccattatttctcacccggacgccggtaagactaccatcaccgagaaggtgctgctgttcggacaggccattcagaccgccggtacagtaaaaggccgtggttccaaccagcacgctaagtcggactggatggagatggaaaagcagcgtgggatctccattactacgtctgtgatgcagtttccgtatcacgattgcctggttaacctgctcgacaccccggggcacgaagacttctcggaagatacctatcgtaccctgacggcggtggactgctgcctgatggttatcgacgccgcaaaaggtgttgaagatcgtacccgtaagctgatggaagttacccgtctgcgcgacacgccgatcctcacctttatgaacaaacttgaccgtgatatccgcgacccgatggaactgctcgatgaagttgagaacgagctgaaaatcggctgcgcaccgatcacctggccgattggctgcggcaagctgtttaaaggcgtttaccacctttataaagatgaaacctatctctatcagagcggtaaaggccacaccattcaggaagtccgcattgttaaagggctgaataacccggatctcgatgctgcggttggtgaagatctggcacagcagctgcgtgacgaactggaactggttaaaggcgcgtctaacgagttcgacaaagagctgttccttgcgggcgaaatcaccccggtattcttcggtactgcgctgggtaacttcggtgtcgatcatatgctggatggcctggtggagtgggcacctgcgccgatgccgcgtcagactgatacccgtaccgtagaagcgagcgaagacaaatttaccggcttcgtatttaaaattcaggccaacatggacccgaaacaccgcgaccgcgtggcgtttatgcgcgtggtatccggtaaatatgaaaaaggcatgaagctgcgccaggtgcgcaccgcgaaagacgtggtgatctctgacgcgctgacctttatggcgggtgaccgttcgcacgttgaagaagcgtatcctggcgatatcctcggcctgcacaaccacggcaccattcagatcggcgacacctttacccagggtgagatgatgaagttcaccggtattccgaacttcgcaccagaactgttccgtcgtatccgcctgaaagatccgctgaagcaaaaacagctactcaaagggctggtacagctttccgaagagggcgcggtgcaggtgttccgtccaatctccaacaacgatctgatcgttggtgcggttggtgtgctgcagtttgatgtggtggtatcgcgcctgaagagcgaatacaacgttgaagcagtatatgaatcagtcaacgttgccaccgcccgctgggtagaatgtgcagacgcgaagaaattcgaagagttcaagcgtaagaacgaaagccaactggcgcttgatggcggcgataacctcgcttacatcgctaccagcatggtcaacctgcgcctggcgcaggaacgttatccggacgttcagttccaccagacccgcgagcattaattcttgcctccagggcgcggtagccgctgcgccctgtcaatttcccttccttattagccgcttacggaatgttcttaaaacattcacttttgcttatgttttcgctgatatcccgagcggtttcaaaattgtgatctatatttaacaaagtaatgacatttctgacggcgttaaataccgttcaatgcgtagatatcagtatctaaagccgtcgattgtcattctaccgatattaataactgattcagaggctgtaatggtcgttattcatcacccatcgcttttgtgatggcgaccattgacttctgtagagggtgaagtctctccctattcagcaatgcaacctcgtgttgccaggctcaaattacgagcaaacatacaggaataaatcgatgactatgacaagactgaagatttcgaaaactctgctggctgtaatgttgacctctgccgtcgcgaccggctctgcctacgcggaaaacaacgcacagactaccaatgaaagcgcagggcaaaaagtcgatagctctatgaataaagtcggtaatttcatggatgacagcgccatcaccgcgaaagtgaaggcggccctggtggatcatgacaacatcaagagcaccgatatctctgtaaaaaccgatcaaaaagtcgtgaccctgagcggtttcgttgaaagccaggcccaggccgaagaggcagtgaaagtggcgaaaggcgttgaaggggtgacctctgtcagcgacaaactgcacgttcgcgacgctaaagaaggctcggtgaagggctacgcgggtgacaccgccaccaccagtgaaatcaaagccaaactgctggcggacgatatcgtcccttcccgtcatgtgaaagttgaaaccaccgatggcgtggttcagctctccggtaccgtagattctcaggcacaaagtgaccgtgctgaaagtatcgccaaagcggtagatggtgtgaaaagcgttaaaaatgatctgaaaactaagtaattcgtcgtaattcgtcctcccgaactttgtcgggaggcgcgatgtgcaccacactaaaaatatcgcattgagtgattttcacgctcatatcaagcggtgacattaactatggtaaaggagacgcttatgtttcgttggggcatcatatttctggttatcgcgttaatcgccgccgcacttgggtttggtggtctggccggtaccgctgcaggcgcagctaaaattgtctttgtcgtcgggattattctgttcctggtgagtttgttcatgggccgaaaacgaccctagatttcagaccattaagaaaattttatccaaagccagtccagcggactggcttttgcggttttagcgaataataaattgcgttactttgtcattctttcacaacaaaaacaggaaggcagaggtggggcagcgaatacctgtaacgcttggtaatattgcgccgttgtcgctaaggccgttccagcctggacgaatagctctggtgtgcgaaggcggcggacagcgtggaattttcacggctggcgtgctggatgagtttatgcgcgcgcagtttaatcctttcgatctttatctcggcacatctgccggggcgcagaacctctcggcgtttatctgcaatcagcccggttacgcgcgcaaagtcatcatgcgctataccacaaaacgcgaatttttcgatccattgcgctttgtccgtggaggaaatcttatcgatctcgactggctggtggaggccaccgcaagccagatgccgttgcaaatggataccgccgcgcggttgtttgacagcggcaaatcgttttatatgtgcgcctgtcgtcaggatgactacgcgccgaattactttttaccaaccaaacaaaactggctggatgtgattcgcgcctccagtgcgatacctggcttttatcgtagcggagtgtcgctggaaggcattaactacctggatggcgggatcagtgatgcgattccggttaaagaggcggcaaggcagggcgctaaaacgttggtcgtcatccgcactgtgccgtcacaaatgtactacacgccgcagtggttcaaacgcatggaacgctggctgggtgacagtagcctgcagccgctggtcaatctggtgcagcatcatgaaaccagctatcgtgacattcagcaatttattgagaaaccaccgggcaagctgcggatattcgaaatttatccaccgaaaccattacatagtatcgcgcttggcagtcggattccggcgctgcgtgaagactataaacttgggcgtttatgcggtcgttatttcctcgccacggttggcaagctattaactgaaaaagcgccgcttacccgccatctggtgccagtggtgacgccggaatcgatcgttattccgcctgcgccagtcgccaacgatacgctggttgccgaagtgagcgatgctccgcaggcgaacgacccgacatttaacaatgaggatctggcttgatttgccgttttatcgatacccactgccattttgatttcccgccgtttagtggcgatgaagaggccagcctgcaacgcgcggcacaagcgggcgtaggcaagatcattgttccggcgacagaggcggaaaattttgcccgcgtgcaggcgttagcggaaaaatatcaaccgctgtatgccgcattggggttgcatccggggatgttggaaaaacatagcgatgtgtctcttgatcagctacagcaggcgctggaaaggcgtccggcgaaggtggtggcggtgggggagatcggtctggatctcttcggcgacgatccgcaatttgagaggcagcagtggttactcgacgaacagctgaaactggcgaaacgctacgatctgccggtgatccttcattcccggcgtacacacgacaaactggcgatgcatcttaaacgtcacgatttaccgtgcactggcgtggttcacggtttttccggcagcctgcaacaggccgagcggtttgtacagctgggctacaaaatcggcgtaggcggtactatcacctatccacgcgccagtaaaacccgcgatgtcatcgcaaaattaccgctggcatcgttgttgctggaaaccgacgcgccggatatgccgctcaacggctttcaggggcagcctaaccgaccggaacaggctgtgcgggtgtttgacgtgctttgcgagttgcgcccggaaccagaagatgagattgccgaagtgttgcttaataatacgtatgcgttgtttagcgttagtgggtagtttacccttcgtaggcagcatccggcagtcggcgcataatgcctgatgcgacgcttgtcgcgtcttatcatgcctacaggtttgtgccgaaccgtaggccggataaggcgttcacgccgcatccggcagttggcgcacaatgcctgatgcgacgctggacgcgtcttatcatgcctacaagtctgtgccgaaccgtaggccgcatccggcatgtcacaaatacagcgccggaaatatcaaccggcccaccccgcgcacctttaatgcatcagccaacggctcaacgtcttccggcgtggcgctcgcccagctttgcgcctcgccatacacgccgtgggcatgaaacgcgttcaggcgtaccggaacatcgccaagtcccttgataaacgccgccagttcttcgatgtgttgcaaataatccacctggccagggattaccagcaaacgcagttccgccagcttgccgcgctctgccagcaaacagatgctgcgcttaatctgctgattatcgcgtccggttaattgttgatgacattcgctaccccatgctttgagatcgagcattgcgccgtcacacaccgggagtaatttttcccagccggtttcgctcaacatgccgttactgtccaccagacaggtgagatggcgcagttgcggatcgtttttgatagcagtaaacagcgccactacaaacggcagttgggtcgtggcttcgccgccgcttaccgttatcccttcaataaacagcaccgctttgcggacatggctaagcacttcgtccacgctcatggattgcgccatcggcgtggcatgttgcggacacctcttcaggcaggtatcacactgctcgcagaccgcagcgttccacaccactttgccgtcaacaatctgcaacgcctgatgcggacactgtggcacgcactctccgcaatgattacagcgccccatcgtccacggattgtgacagtttttgcagcgcagattgcagccctgcaaaaacagagccagacgactgcctggcccgtcaacgcaggagaaggggataatcttactgactaaagcgcatctgctgttcatggcttatcacgcgcggctggcgttccagaatacgagtgttgcgtgcggcttcttcgcccagccaggtggtgttggtgcgtgaaccttcggcgcgatatttttctaaatccgacaaacgcaccatataaccggtaacgcgaaccagatcgttaccgctgacattggcggtaaattcacgcattccggctttaaaggcaccgaggcaaagctgtaccagcgcctgcggattacgtttgatggtttcgtcgagcgtcagaatgtcgctgatgccggaataataataagcatgatgcggggcgacagtttgcagatgggtgatcggatctggctcatcgccatagggtaaacgcgcgcccggcgtggtgccgatatcggaactgatccccgactgtgcgtgtaacatggcgcgtttttgccagccatatttcacgggggtattggcgacaaactccgccagttgcgcgctgatgcgataacccacttcatttgcggcggcttctttaccgtagcgcgcggcaatcccttctttctcacacagcaagttaaccgcttccgccagcccatacatgccaaacattggcacaaaacgttcagggttaatcagcccttctttcaccaggaagctattctcaaagaagtgtgattgttgatagaggaattcacaccgcgcatcgatgatggcgatctgctgctggcagtagtgcggtagagtgcgcgtaaagaagtcatccagcgattcgctgcgctcggcaatggctttcaggttaaggcgtaccagcgtgctgccaccacccgccagcggcagtgagttgtaacagctcacaatcccgtagcccccttttgtgaaaattttatcatgcaccggaccgttggcgatgtgcggtttgctacattcacagatgttcttcgccacttccagcagtaggtcatcaggggtgatttcaggatcgtagataaaggtcaggttcggtgaaacctgcttcaactctgcgtctgcacgtaagattgcacgggtaatgggcgaatcagacgggccgatattggcgtgcataaaggcgtctggcagggttctgtcgaggtaacgccagaaacgttttattcgaatatcgatctcgtcttgtgttagaattctaacatacggttgcaacaacgcatccagttgccccaggtagaccggcatcgatgtgaccgacggtacgtggtggtaaagaatggtcagcagagagagtgcgtcatcaagatctttcgcgccttccagctccagccattcggaaccgttcgccagaaaacgggcgtaatcgggtaagacatagcgcggtttgtacggcgcatgaccttcaaacatatcgcagattacaccctcatccagcgcacggcgggcttcggcaggcagctgcggataaggcagattgttttctgcttcaagtgccagaaaatggcgcttctgctccgggctaagcactgggctggtgacaatttgctggcaacgttgttgcagtgcattttcatcagaagtgggcatcttcttttccttttatgccgaaggtgatgcgccattgtaagaagtttcgtgatgttcactttgatcctgatgcgtttgccaccactgacgcattcatttgaaagtgaattatttgaaccagatcgcattacagtgatgcaaacttgtaagtagatttccttaattgtgatgtatatcgaagtgtgttgcggagtagatgttagaatactaacaaactcgcaaggtgaattttattggcgacaagccaggagaatgaaatgactgatctgaaagcaagcagcctgcgtgcactgaaattgatggacctgaccaccctgaatgacgacgacaccgacgagaaagtaattgctctgtgtcatcaggccaaaactccggtcggcaataccgccgctatctgtatctatcctcgctttatcccgattgctcgcaaaacgctgaaagagcagggcaccccggaaatccgaatcgctacggtaaccaacttcccacacggtaacgatgacatcgaaatcgcgctggcagaaacccgtgcggcaatcgcctacggtgcagatgaagttgacgttgtgttcccgtaccgcgcgctgatggcgggtaacgagcaggttggttttgacctggtgaaagcctgtaaagaggcttgcgcggcagcgaatgtactgctgaaagtgatcatcgaaaccggcgaactgaaagacgaagcgctgatccgtaaagcgtctgaaatctccatcaaagcgggtgcggacttcatcaaaacctctaccggtaaagtggctgtgaacgcgacgccggaaagcgcgcgcatcatgatggaagtgatccgtgatatgggcgtagaaaaaaccgttggtttcaaaccggcgggcggcgtgcgtactgcggaagatgcgcagaaatatctcgccatcgcagatgaactgttcggtgctgactgggctgatgcgcgtcactaccgctttggtgcttccagcctgctggcaagcctgctgaaagcgctgggccacggcgacggtaagagcgccagcagctactaagtaagatgctttacgcctgatgcgctgcgcttatcaggcctacgagacgtatctacccgtaggccggataaggcgtagacgcatccggcaaaagccgcctcatactcttttcctcgggaggttaccttgtttctcgcacaagaaattattcgtaaaaaacgtgatggtcatgcgctaagcgatgaagaaattcgtttctttatcaacggtattcgcgacaacactatctccgaagggcagattgccgccctcgcgatgaccattttcttccacgatatgacaatgcctgagcgtgtctcgctgaccatggcgatgcgagattcaggaaccgttctcgactggaaaagcctgcatctgaatggcccgattgttgataaacactccaccggcggcgtcggcgatgtgacttcgctgatgttggggccgatggtcgcagcctgcggcggctatattccgatgatctccggtcgcggcctcggtcatactggcggtacgctcgacaaactggaatccatccctggcttcgacattttcccggatgacaaccgtttccgcgaaattattaaagacgtcggcgtggcgattatcggtcagaccagctcactggctccggcggataaacgtttctacgcgacccgtgatattaccgcaaccgtggactccatcccgctgatcaccgcctctattctggcgaagaaactggcggaaggtctggacgcgctggtgatggacgtgaaagtgggtagcggcgcgtttatgccgacctacgaactctctgaagcccttgccgaagcgattgttggcgtggctaacggcgctggcgtgcgcaccaccgcgctgctcaccgacatgaatcaggtactggcctccagtgcaggtaacgcggttgaagttcgtgaagcggtgcagttcctgacgggtgaatatcgtaacccgcgtctgtttgatgtcacgatggcgctgtgcgtggagatgctgatctccggcaaactggcgaaagatgacgccgaagcgcgcgcgaaattgcaggcggtgctggacaacggtaaagcggcagaagtctttggtcgtatggtagcggcacaaaaaggcccgaccgacttcgttgagaactacgcgaagtatctgccgacagcgatgctgacgaaagcagtctatgctgataccgaaggttttgtcagtgaaatggatacccgcgcgctggggatggcagtggttgcaatgggcggcggtcgtcgtcaggcatctgacaccattgattacagcgtcggctttactgatatggcgcgtttgggcgaccaggtagacggtcagcgtccgctggcggttatccacgcgaaagacgaaaacagctggcaggaagcggcgaaagcggtgaaagcggcaattaaacttgccgataaagcaccggaaagcacaccaactgtctatcgccgtatcagcgaataacggtatactgatctgatcatttaaatttgaagcactgagtacggagaacatatgaaacgtgcatttattatggtgctggactcattcggcatcggcgctacagaagatgcagaacgctttggtgacgtcggggctgacaccctgggtcatatcgcagaagcttgtgccaaaggcgaagctgataacggtcgtaaaggcccgctcaatctgccaaatctgacccgtctggggctggcgaaagcacacgaaggttctaccggtttcattccggcgggaatggacggcaacgctgaagttatcggcgcgtacgcatgggcgcacgaaatgtcatccggtaaagataccccgtctggtcactgggaaatcgccggtgtcccggttctgtttgagtggggatatttctccgatcacgaaaacagcttcccgcaagagctgctggataaactggtcgaacgcgctaatctgccgggttacctcggtaactgccactcttccggtacggtcattctggatcagctgggcgaagagcacatgaaaaccggcaagccgattttctatacctccgctgactccgtgttccagattgcctgccacgaaggaacctttggcctggataaactctacgaactgtgcgaaatcgcccgtgaagagctgaccaacggcggctacaacatcggtcgtgttatcgctcgtccgtttatcggtgacaaagccggtaacttccagcgtaccggtaaccgtcacgacctggctgttgagccgccagcaccgaccgtgctgcagaaactggttgatgaaaaacacggtcaggtggtttctgtcggtaaaattgcagacatctacgccaactgcggtatcaccaagaaagtgaaagcaactggcctggacgcgctgtttgacgccaccatcaaagagatgaaagaagcgggtgataacaccatcgtcttcaccaacttcgttgacttcgactcttcctggggccaccgtcgcgacgtcgccggttatgctgcgggtctggagctgttcgaccgccgtctgccggagctgatgtctctgctgcgcgatgacgacatcctgatcctcactgctgaccacggttgtgatccgacctggaccggtactgaccacacgcgtgaacacattccggtactggtttacggcccgaaagtaaaaccgggctcactgggtcaccgtgaaaccttcgcggatattggtcagactctggcaaaatattttggtacttctgatatggaatatggcaaagccatgttctgataatgggtgcggcttgatgccctcaccccggccctctcccacagggagagggtgaaaacatgttgataaggataaaacaatggctaccccacacattaatgcagaaatgggcgatttcgctgacgtagttttgatgccaggcgacccgctgcgtgcgaagtatattgctgaaactttccttgaagatgcccgtgaagtgaacaacgttcgcggtatgctgggcttcaccggtacttacaaaggccgcaaaatttccgtaatgggtcacggtatgggtatcccgtcctgctccatctacaccaaagaactgatcaccgatttcggcgtgaagaaaattatccgcgtgggttcctgtggcgcagttctgccgcacgtaaaactgcgcgacgtcgttatcggtatgggtgcctgcaccgattccaaagttaaccgtatccgttttaaagaccatgactttgccgctatcgctgactttgacatggtgcgtaacgcggtagacgcggctaaagcactgggtgttgatgctcgcgtgggtaacctgttctccgctgacctgttctactctccggacggcgaaatgttcgacgtgatggaaaaatacggcatcctcggcgtggaaatggaagcggctggtatctacggcgtcgctgcagagtttggcgcgaaagccctgaccatctgcaccgtgtctgaccacatccgcactcacgagcagaccactgccgctgagcgtcagaccaccttcaacgacatgatcaaaatcgcactggaatccgttctgctgggcgataaagagtaattgtgtttcgctgaaaggcgaacgtcgtgttaaggcggagcaggagactgctccggctttttagtatctattcatcaatagcaactgatttatagatttactattatttttcatatggatagaaaataaaatccattcaagtatctattcacgaatctattcatttatgttcagccgtcatccaggaagggcatatcagcaactctggtggacaaccataaatttctgccattttgcttttgatgtttgagctaagccgttccgtcttttcgatctgttttagagaattaatcgagatacctaacattttacttacttcagcaagcgataatttatgcctgatacgcacggcggctagccaggaaatacgctggcttaacattaaattgataatctcccgctcctggttttccagatcgatcatattcccttcctttggtattttaatcagcgagttaccttaccgcccccgctatccacgtcgacaactcccgtagctctttttcctggtccgggaagtcaaccaacagcgcttcgcactcttgttgcagcatatccgcgcggtacaggcagccttgcagtcgcccggcgagggcttccagcggcgcggggttgaggctgtcggtaaacacctgggcgcgggtgatatggcctttttcaacgtcgaaatgcagttccacgccgccccagctaaagcgttcatccagcagatgcgagaatgccggagcctgaccgaagttccattcccagctactctgacgggcaaaggtttcggcgaagtttggcaagtctggcgttttgtccggggagatgatttccgcttctacacgctcgccataatgggcgaaaaaggccttggttatgacctcgcaaacctgctcatgggtgatccccggcagcagctcggtgaggttggtcacgcgggaacgcactgaggtaatgcctttcgccgccagtttctttttatccggattgagatagtttgccaggcggctaaggtcggcattgagcagcaaagtgccgtggtggaagccacgatctttggtttcgcgataggccgagcctgagactttgcggtcgccttcgactgttttcaccaccagatcgttacgcccggacgcttcggcgctgacgccgagcgcgttcagcgcattgagcacaatcgacgtagagatggttttatcgtactccggcttgccagccataaaggtaaagcaggtattgccgagatcgtggaacaccgcgccgccaccgctactgcgccgcgccaggcggacgttatcttcttccatccgccgggtattacactctttccacgggttctgcgcgcgaccaatcactaccgtgtcggcattgcgccagagaaacagaacgcgctgcgtggcgggcatttggcgaaaaatacactcttccaccgccaggttaaaccacgggtcgtaagagtcagagatgagcaggcgtaatgtggacataacgatttcctttcttgtagtaatgggtcactcttttttctcgctttcttcctcttccggcaccggtttgctggcggttaacaggaagggcgattgctgccagcgggtgcgtttaccctgtagcagcgtgcgggtcagcactacgccgattgccagtgagagcagcaacatcaggcgtaaaatgttagtggtgttatccacctgttgggcttcggtggcgagcgtatgggtgtcgagtgtcaggcgcagatagccgagcggtccgtttttacccgcaattggctcgacaatctgctggttaaaatagccgcctgcttttttaccgtcgagcgccagccggtcgcgcacttcgacgctttcgcctgaacgggcgataagatcgccttgttcgtcatacacacccgcgtcgaggatgcggctttcatccgttaactgatcgaggatcgcctgaatgcgtttttcatctggtgagtcggtacgcatcagcggtgcaacgttcagcgttacctgacgcgccagggtgcgggccagttcttccagctgtggattacgttgtcgctggtggttttgactaaaccatgacgctccctgcatcagcgccactaacaaggcaagacagaacaggacaatcactgcccgatgcagccggaatttcagttttgtgcgagccatcttccaccctttgaaaatttgagacttaatgttgccagaagcaatggatacaaggtagcctcatgcgttattttccctgcttcgaacgattttacaggagccttaatgcctaacattacctggtgcgacctgcctgaagatgtctctttatggccgggtctgcctctttcattaagtggtgatgaagtgatgccactggattaccacgcaggtcgtagcggctggctgctgtatggtcgtgggctggataaacaacgcctgacccaataccagagcaaactgggcgcggcgatggtgattgttgccgcctggtgcgtggaagattatcaggtgattcgtctggcaggttcactcaccgcgcgcgctacgcgcctggcccatgaagcgcaactggatgtcgcgccgctggggaaaatcccgcacctgcgcacgccgggtttgctggtgatggacatggattccaccgccatccagattgaatgtattgatgaaattgccaaactggccggaacgggcgagatggtggcggaggtaaccgaacgggcgatgcgcggcgaactcgattttaccgccagcctgcgcagccgcgtggcgacgctgaaaggcgctgatgccaatattctgcaacaggtgcgtgaaaatctgccgctgatgccaggcttaacgcagctggtgctcaagctggaaacgctgggctggaaagtggcgattgcctccggcggctttactttctttgctgaatacctgcgcgacaagctgcgcctgaccgccgtggtagccaatgaactggagatcatggacggtaaatttaccggcaatgtgatcggcgacatcgttgacgcgcagtacaaagcgaaaactctgacccgcctcgcgcaggagtatgaaatcccgctggcgcagaccgtggcgattggcgatggagccaatgacctgccgatgatcaaagcggcagggctggggattgcctaccatgccaagccaaaagtgaatgaaaagacggaagtcaccatccgtcacgctgacctgatgggggtattctgcatcctctctggcagcctgaatcagaagtaattgcctgcccgtcatcctgcgggcggcacagcattaacgaggtacaccgtggcaaaagctccaaaacgcgcctttgtttgtaatgaatgcggggccgattatccgcgctggcaggggcagtgcagtgcctgtcatgcctggaacaccatcaccgaggtgcgtcttgctgcgtcgccaacggtggcgcgtaacgagcgtctcagtggctatgccggtagcgccggggtggcaaaagtccagaaactctccgacatcagccttgaagagctgccgcgtttttccaccggatttaaagagttcgaccgcgtattaggcggcggcgtggtaccgggaagtgccattctgattggcggtaacccaggcgcggggaaatccacgctgttgctgcaaacgctgtgcaaactggcccagcagatgaaaacgctgtatgtcaccggcgaagagtcgctgcaacaggtggcaatgcgcgctcatcgccttggcctgccgactgacaatctcaatatgttgtcggaaaccagcatcgagcagatctgcctgattgctgaagaagagcaaccgaagctgatggtaattgactccatccaggtgatgcatatggcggatgtacagtcatcgcctggtagcgtggcgcaggtgcgtgaaacggcggcttatttgacacgcttcgccaaaacgcgcggtgtggcgattgtcatggttggacacgtaaccaaagatggctcgctggcgggccctaaagtgctggaacactgtatcgactgttcggtgcttttggatggcgatgccgactcccgttttcgcaccttgcgcagccataaaaaccgcttcggcgcggtgaatgagctgggcgtcttcgcgatgaccgaacaggggctgcgtgaagtcagcaacccttcggcaattttcttaagtcgcggagatgaagtgacctccggcagctccgtgatggtggtgtgggaaggaacgcgtccgttgctggtggagattcaggcgctggtcgatcactcgatgatggcgaatccgcgccgcgtggcggtaggtctggagcaaaaccgtctggcaatcctgctggctgtcttgcaccgtcacggtggtctgcaaatggccgatcaggatgtatttgtgaacgtggtcggtggtgtgaaggtaaccgaaaccagtgccgacttagcgttactgctggcgatggtttccagcctgcgtgacagaccgctaccgcaggatctggtggtgtttggtgaagtcgggctggcaggggagatccgcccggtgcccagcggtcaggagcgaatctctgaagcggcgaaacacggttttcgccgggcgattgttccggcggctaacgtgccgaaaaaagcgccggaagggatgcagatttttggcgttaaaaaactctccgacgcgcttagcgtgttcgacgacttataatgagagatacggagggagatatgtcgtcatttgattacctgaaaactgccatcaagcaacagggctgcacgttacagcaggtagctgatgccagcggtatgaccaaagggtatttaagccagttactgaatgccaaaattaaaagccccagcgcgcaaaagctggaggcgttgcaccgttttttggggcttgaatttccccggcagaagaaaaccattggtgtcgtattcggtaagttctacccgctgcataccggacatatctaccttatccagcgcgcctgtagccaggttgacgagctgcatatcattatgggttttgacgatacccgcgaccgcgcgttgtttgaagacagcgccatgtcgcagcagcccacggtgccggatcgtctgcgctggttattgcaaacttttaaatatcagaaaaatattcgcattcatgctttcaacgaagagggcatggagccgtatccgcatggctgggatgtgtggagcaacggcatcaaaaagtttatggctgaaaaggggatccagccggacctgatctacacctcggaagaagccgatgcgccacagtatatggaacatctggggatcgagacggtactggtcgatccgaaacgtacctttatgagtatcagcggtgcgcagatccgcgaaaacccgttccgctactgggaatatattcctacggaagtgaagccgttctttgtgcgtaccgtggcgatccttggcggcgagtcgagcggtaaatccaccctggtaaacaaacttgccaatatcttcaataccaccagtgcgtgggaatatggtcgcgattatgtcttttcacacctcggcggtgatgagatcgcattgcagtattccgactacgataaaatcgcgctgggccacgcacaatacattgattttgcagtgaaatacgccaataaagtggcgtttattgacactgattttgtcactacccaggcgttctgcaaaaagtacgaagggcgtgagcatccgttcgtgcaggcgttgattgatgaataccgtttcgatctggtgatcctgctggagaacaacacgccgtgggtggcggatggtttacgcagcctcggcagttcggtggatcgcaaagagttccagaacttgctggtggagatgctggaagagaacaatatcgaattcgtgcgggttgaagaggacgattatgacagccgtttcctgcgctgcgtggagctggtgcgggagatgatgggggagcagagataaccgcgatgaaacggctcaaaggcgaggtataaaataagttttttgatgagttgaaaacctttctggaagaggctgtcgagattaaacaaggtttgaaaaaacctgcacgggtgacccgctacgaaattgcggatactaaggctgttgtaggccggaaaaggcgttcacgccgtatccggcattcggtgctcaatgcctgatgcgacgcttaccgcgtcttatcaggcctggagattcacaacgtattgaaatttcttggtttgtaggccggataaagcgttcacgccgcatccggcattttacgcattacttcgcaatacgcttgtacttgatacgcttcggctccagtgcgtctgcgcccagcgtgcgtttcttgtactcttcgtactcagtaaagttaccttcgaagaactcaactttaccttcatcctggtagtccaggatgtgcgtggcgatacggtcgaggaaccaacggtcgtgcgagataaccatcgcacagcccgggaactccagcagggcgttttccagcgcgcgcagggtttcgatatccaggtcgttggttggttcgtcgagcagcagcatgttgccgccaacctgcagcagcttcgccagatgcagacgaccgcgctcaccaccggaaagttcaccaacgcgtttaccctgatcaacccctttaaagttaaagcggccaacgtaggcgcggcttggcatctcggtgttgccgatcttcataatatccagcccgccggaaacttcttcccaaacggttttgctgttatccattgagtcacggaactgatcaaccgatgccagtttcaccgtttcacctaaagtgatggtgccgctgtccggctgttcctgaccagagatcatacggaacagggtcgatttacccgcgccgttcggaccgatgatcccgacgattgcccctttcgggatcgagaagctcaggtcatcaatcagcaggcgatcaccgtaggatttacgcaggttgctgacttccagcactttatcgcccagacgcggtccaggtggaataaacagttcgttggtttcgttacgtttctgatattcggtgctgttcagctcttcaaagcgtgccagacgtgctttacctttcgactggcggcctttagttccctgacgtacccactccagctctttctcgatcgacttacgacgcgccgcttcttgtgaagcttcctgcgccaggcgctgatctttctgctccagccaggaggagtagttgccttcccacggaataccttcaccgcggtcaagttcgaggatccagcctgcaacgttatcgaggaagtaacggtcgtgggtaatcgccaccacggtgccctcgaagtcgtgcaggaagcgttccagccaggccacggattcggcatccaggtggttggtcggttcgtcgagcagcagcatgtctggtttttccagcagcaggcggcacaacgctacgcgacgacgctcaccaccggagaggttagcgattttcgcgtcccagtccggcagacgtagcgcatccgccgcacgctccagctgtacgttcaggttatgaccgtcgtgagcctgaatgatctcttccagacggccttgttcagcggccagcttgtcaaaatcggcatccggatcggcgtacagcgcatacacttcatccaggcgtttcagggcgttaaccacttcagaaaccgcttcttcaatggactcacgcacggtgtgttccgggttcagctgcggttcctgcggcaggtaaccaatcttgatgtctggctgcggacgcgcttcaccttcgatgtctttatcaatgcccgccataatgcgcagcagggtagacttacccgcgccgttcagacccaggacaccaatttttgccccagggaagaaactcagagagatgtttttcaaaatatgacgtttcggcggaacaactttgccgacacgatgcatggtataaacgaattgagccacgttggacttcgcctctatgtttatcgtgatgatgagttttcaaaggcgaagtgtagcctttttccccgcctaatcccagttggtcgatcaccttcgcagtaaaagtaaaaaagtgtccgtaacgtggcgtaaacggcaatgactggttagcataaatctattacgcggcatgacgctgcattgatgtatttacacttagaggatgcgcttgtggaaaaagccaaacaagttacctggcggctgttggctgccggtgtctgtctgctgacggtcagcagcgtggcgcgagccgactcactggatgagcagcgtagccgttacgcgcaaatcaagcaggcctgggataatcgacaaatggatgtggtcgaacaaatgatgcctggactgaaggattatccgctttatccctacctggaataccgccagatcaccgatgatctgatgaatcaaccggcggtgacggtcactaactttgttcgcgctaaccccacgcttcctcccgctcgcacgctgcaatctcgtttcgtcaatgaactggcgcggcgtgaagactggcgtggcttgttagcctttagcccggaaaagcccggaactaccgaagcgcaatgtaattactactatgcgaaatggaacaccgggcagagtgaagaagcctggcaaggggcgaaagagctgtggctaaccggcaagagccagcctaacgcctgtgacaagttatttagcgtctggcgtgcgtcaggtaaacaagatccgctggcttatttagagcgtatccgtctggcgatgaaagcgggtaacactggcctggtaacagtgctggcagggcagatgcctgccgattaccagactatcgcctcggcaatcatttcactggcgaacaaccctaatacggtactgaccttcgcgcgtacaaccggagcgaccgattttacccgtcaaatggcggcggtggcgtttgccagtgtggcgcggcaggatgctgaaaatgcacggctgatgatcccgtcgcttgcccaggcgcagcagcttaatgaagatcatattcaggagctgcgcgatatcgtcgcctggcgtttgatgggcaacgatgtcaccgacgagcaggcgaaatggcgcgatgacgccattatgcgctcgcaatccacgtcgttgattgaacgccgtgtgcgaatggcacttggcaccggcgatcgtcgcggcctgaatacctggctggcgcgtctgccgatggaagcaaaagagaaagatgaatggcgttactggcaggcggatttattgctggaacgcggacgtgaagctgaagcgaaagagattttgcatcaactcatgcaacagcgtggtttctacccgatggttgcagcacaacgcatcggagaagagtatgagctgaagattgataaagcgccgcagaatgttgacagcgccctgactcaggggccggagatggcgcgcgtgcgcgagttgatgtactggaatctcgataacaccgcgcgtagcgagtgggccaatctggtgaagagcaagtcaaaaacagagcaggctcaactggcgcggtatgctttcaacaaccaatggtgggatcttagcgttcaggcaacgatcgccgggaagctgtgggatcatctggaagagcgattcccgctggcttacaacgatcttttcaaacgttacaccagtgggaaggagatcccgcaaagctatgcgatggcgattgcccgtcaggagagcgcctggaatccaaaagtgaaatcaccggtaggggccagcggcctgatgcagattatgcctggtacagcgacccatacggtgaagatgttctctattcctggttatagcagccctgggcaattgctggatccggaaacgaatatcaacattggcaccagttatctgcaatatgtttatcagcagtttggcaataaccgtattttctcctcagcagcttataacgccggaccagggcgggtgcgaacctggcttggcaacagcgccgggcgtatcgacgcagtggcatttgtcgagagtattccgttctccgagacgcgtggttatgtaaagaacgtgctggcttatgacgcttactaccgctatttcatgggggataaaccgacgttgatgagcgccacggaatggggacgtcgttactgatccgcccgtttatgatatgctatcgtactctttagcgagtacaaccgggggaggcattttgcttcccccgctaacaatggcgacatattatggcccaacaatcaccctattcagcagcgatggcagaacagcgtcaccaggagtggttacgttttgtcgacctgcttaagaatgcctaccaaaacgatctccatttaccgttgttaaacctgatgctgacgccagatgagcgcgaagcgttggggactcgcgtgcgtattgtcgaagagctgttgcgcggcgaaatgagccagcgtgagttaaaaaatgaactcggcgcgggcatcgcgacgattacgcgtggatctaacagcctgaaagccgcgcccgttgagctgcgccagtggctggaagaggtgttgctgaaaagcgattgattttgtaggcctgataagacgcggcagcgtcgcatcaggcatcgtgcaccgaatgccggatgcggcgtgaacgccttatccgtcctacaatgcctgatatacggcattgtgaaacggactcagcgccaggatcaccgcctggtgatagacgctggcgcgagtgagtttcccggcggtaaacacgccgatcgccccttccttacgaccaatctcatcaataccggtataacgcgacatcacgggaccaagcgcctcaccttcacgcactttttccagaatcaccgcaggcaacggcaaagtagccgaacgcgcctcgccgcgctggctggcgttttcaatcaccacccaactgaaagtgctgtcaccatcgatgccagcttcaatcgccacccaaaaatcagcctctggaagtaaacggcgggcatttgctacccgatttcgtgcgccagcgcgcgtttcctcactgccaaagggttgttccggtacaccgctctcgacggcaacggatgcaatatggcaggatccttcgccgaagatctcgtgaaatgcctgcagaatggcctgaattttagcgggattggtggtcgcacagacaacttggtgcataatcagcattactcagaaaattaacgttacagcagtatacggaaaaaaagcatgttacaggtatacctagtccgccacggtgaaacgcagtggaacgccgagcgacgtattcagggccagtctgacagcccgctgaccgccaaaggtgagcaacaggcgatgcaggtggcaacccgtgccaaagagcttggcattacgcatattatcagtagcgatttaggacgcacccggcgtacggcggaaatcatcgcccaggcctgcggctgtgacatcatctttgattctcgcctgcgtgaattaaacatgggtgtgctggaaaaaagacatatcgattctctgaccgaagaagaagagaactggcgtcggcagctggtcaatggcaccgttgacgggcgtattcctgaaggcgagtcaatgcaggagctcagcgatcgcgtcaatgcggcactggaatcttgccgggacttaccgcagggaagccgaccgctgctggtgagtcatggtattgcactgggatgcctggtgagtacgattctcggattaccagcatgggcagagcgccgcttacgtctgcgtaactgttctatttcgcgcgtggattatcaggaaagcctgtggctggcgtctggctgggtcgttgaaaccgcaggggacatctcgcatctggacgcccctgcattagatgagctgcagcgttaacggcggataggaatcagcagttcacagcgcagattaattgggcgatctcccgctttggcgtcttctgccgggtagtatcgctcaatatcctgacctttacggcgcgtcaggttgagcattggcatgcacgttccgtataccgtcaggataaactcctgcacgccggttcccagaccttcataggtaaacatcacatattcgccgccctgcagcatcaccggatgccccgtcagtacatagccatctgcctgatcctgggctaacgcggtggtatagaatacctcttgttcgtcgtctttatcctgactcggacgcgtttcattcaggccgtagagcactggcggaatggtcggcgcgttgccgagaaaatcgtgccagaactgataacgcatttcatggcggaaatcagagatttgctccagcgaacaggagtagctctgggtaacaccaatcagcggcgtatcttccagggtgacaaatttatgctctggcatagtgaattcacccagacgcagcggcgggcgaataccaaaggcgctccattcaggagaacggcggtaaagtgcaggagtctgggcaaactgcttcttgaatgcgcgggtaaatgtctgttgagagtcgaagcggtattgcagcgcgatgtccagaatcggacgcgcagtcaggcgtagtgcgaccgccgatttcgacaaacgacgagcacgaatatacgcgccaatagcatggccagtgacatctttaaacattctctgtaagtgccacttggaataacctgctttcgccgctacattgtcgagcgacaggggctgatccagatgaccttccagccagattaaaaggtcgcgaataatgccggcctgatccataaaatatcctcatcctttcaacaacgagcacctgacatcaggtaattggataatagcattttttgctgttttagcattcagtgtttttttcttagtagagtatgttttaggtcttgacggaaataaaagtattgagattttgttcttaatcaatatgttatttaccgtgacgaactaattgctcgtgtaatagataaaaatggtaacaatatgaaatacaagcatttgatcctgtctttaagcctgataatgctggggccattggctcatgcagaagagattggttcggtcgacaccgtatttaaaatgatcggcccggatcacaaaattgttgtggaagcctttgacgatcccgatgtgaaaaatgtcacctgttatgtgagccgggcgaaaacaggtggtattaaagggggattgggtctggcggaagatacctccgatgcggctatttcttgtcagcaagtcgggccgattgaactgtcggatcgtattaaaaacggcaaagctcagggcgaggtagtattcaaaaaacgcacgtccctggtctttaagtcgttacaggtcgtgcgcttttatgacgccaaacgcaacgcgctcgcttatctggcttactccgacaaagttgtagaaggttcgccgaaaaacgcgattagcgcggttcctgtcatgccgtggcggcaataacagaggcgatttatgcaacgggaaacggtctggttagtggaagatgagcaagggatagccgacacgctggtctacatgttgcagcaggaaggttttgccgtcgaggtctttgagcgaggcttgccggtgctggataaagctcgccagcaggctcccgacgtcatgattctcgatgttggtttgcctgatatcagcggctttgaattatgccgccagttactggcgctccatccggcgttacctgtactgttcctgacggcccgaagtgaagaggtcgatcgcctgcttgggctggaaattggcgctgacgactatgtggctaaaccgttttcaccccgcgaagtgtgcgccagggtgcgcaccttactgcgtcgggtgaagaagttctcgtcgccgtctcccgtcatccgtattggtcattttgaattgaatgaacccgcggcgcagatcagctggtttgacacgccattaacgctgacgcggtatgagtttttattgctgaagacgttactcaagtcgccaggccgcgtctggtcccgccagcaactaatggatagcgtgtgggaagatgcgcaggacacctacgatcgcaccgttgatacccacattaaaacgttgcgtgccaagctgcgcgccatcaaccccgatctttcaccgattaatactcatcgcggcatgggatatagcctgaggggcctgtaatgcgtatcggcatgcggttgctgctgggctattttttactggtggcggtggcggcctggttcgtactggctatttttgtcaaagaagttaaaccgggcgtgcgaagagcaacggaggggacgttaatcgataccgcaacgttgctggcggagctggcgcgtcccgatttgctctctggggacccaacgcatgggcaactggcgcaggcgtttaatcagctacaacatcgcccgtttcgcgccaatatcggtggcattaacaaagtgcgcaatgaatatcatgtctatatgaccgattcgcagggtaaagtattgttcgattcggcaaataaagccgttgggcaggattattcgcgctggaatgacgtctggctaacgttgcgtggtcagtatggtgcgcgcagcacgttgcaaaatcctgccgatcccgaaagttcggtgatgtatgttgccgcgccgattatggacggctcgcggcttattggcgttttgagcgtaggcaaaccgaacgcggcgatggctccggtcattaagcgtagcgagcggcgaattttatgggccagcgccattttgctggggattgcactggtgattggcgcaggcatggtttggtggatcaaccgctccattgcccggctcactcgctatgccgattccgtcactgacaataagcccgttcctcttcctgaactcggcagtagcgagttgcgtaagcttgcgcaggcgctggaaagtatgcgcgtgaagctggaagggaaaaactatattgagcagtatgtttatgcgttaacccatgagctaaaaagcccactggcggcgattcgtggcgcggcggaaattttacgcgaaggtccgccaccggaagtggtggctcgttttaccgacaacattctgacgcaaaatgcgcgtatgcaggcattggtagaaacgttactacgccaggcaagactggagaatcgtcaggaagtcgttctgactgttgttgatgtggcggcattatttcgccgcgtcagcgaagcgcgcaccgtgcagttggcagaaaaaaacatcactctacatgttatgcccactgaggttaatgttgctgctgaaccggcgttactggagcaggcgctggggaatttactggataacgccatcgattttacccccgagagcggtcgcataacgctaagcgccgaagtggatcaggaacacgtcgcccttaaggtgctggataccggtagtggtattcctgactacgcgctgtcacgtatttttgaacgcttttactctttgccgcgtgcaaatgggcaaaaaagcagcggtctggggttggcgttcgtcagtgaggtcgcccgtttgtttaacggcgaagtcacgctgcgcaacgtgcaggaaggtggcgtgctggcctcgcttcgacttcaccgtcacttcacatagcttcaaattcttcccacatagccttcgtatcctgctgccattgcaaaggagaagactatgttgaaatcccccctgttctggaaaatgaccaccttgtttggtgcagtattgctgttgttgattccgataatgctgattcggcaagtgattgtcgaacgtgccgattaccgtagcgatgtggaagatgcgattcgccaaagtaccagcgggccgcaaaaactcgttgggccgcttatcgctattcctgtgaccgagctttatacggtgcaggaagaggataaaaccgtggagcggaaacgaagttttatccatttttggttacctgagtcattgatggttgatggcaatcagaacgtggaagaacgcaagatagggatttataccggtcaggtctggcacagtgatttaacgctaaaagccgatttcgatgtttcgcgtcttagcgagctcaacgcgccaaatatcatcttaggcaagccctttattgtgattagcgtcggggatgcgcgtggtattggtgtggtgaaagcgcctgaagttaacggaacggcgctgaccattgaacccggcaccgggttagagcaaggcgggcagggcgtgcatatccctttacccgaaggggactggcggaagcagaacctgaagctgaatatggccctgaatttaagcggtaccggcgatctttctgtggtgcctgccgggcgtaatagcgaaatgaccttaaccagcaactggccgcatcccagttttttaggtgattttttgccagccaaacgggaagttagcgagtcaggttttcaggcgcaatggcaaagcagctggtttgctaataatctcggtgagcgttttgcttcaggcaatgataccggctgggaaaacttccccgcgtttagcgtcgcagtgacgacgccagccgatcaataccaattaacggaccgggcgactaagtacgccattctgctgattgcactgacttttatggcgttctttgtttttgaaacgctcaccgcgcaacgtttacacccaatgcaatatttgctggtggggctttcattggtgatgttttatttgctcttgctggcgctttctgaacatatcggttttaccgtggcatggataatcgccagtctgattggggcgttaatgaacggtatttatttgcaggcggtattgaaaggctggcgcaacagcatgttgtttaccctcgcgctgttgttgctggatggtgtgatgtggggactgctcaactctgccgatagcgcgctgttgttgggaaccagtgtgctggtggtggcgctggccggcatgatgtttgtgactcgtaatatcgactggtatgcgttttcactgccgaaaatgaaagccagtaaagaagttacaatggacgatcaattacgtatctggaaataaggttgaaaaataaaaacggcgctaaaaagcgccgttttttttgacggtggtaaagccgattaatcttccagatcaccacagaagcgataaccttcaccgtggatggtggcgatgatttccggcgtatccggcgtagattcgaaatgtttacgaatacggcggatcgtcacgtctacagtacggtcgtgtggtttcagctcacggccggtcattttcttcagcagttcagcacgagactgaattttgcctgggttttcacagaagtgaagcatggcgcggaactcgctgcgcggcagcttgtactgctcgccatcagggccgatcaacgaacggctgttgatgtccagttcccaaccattgaacttgtagctttcaacgctacgacgttcttcgctgacagtacccagattcatggtacgggacagcaggttgcgtgcacgaatcgtcagttcacgcgggttgaacggtttggtgatgtagtcatctgcaccgatttcgaggccgagaattttatcgacttcgttgtcacggccagtcaggaacatcaacgcaacattcgcctgctcgcgcagttcacgcgctaacagaagaccgttcttacccggcagattgatatccatgatcaccaggttgatgtcatattcagagaggatctgatgcatttccgcgccatctgtcgcttcgaaaacatcatagccttccgcttcgaaaatacttttcaacgtgttgcgtgttaccaactcgtcttcaacgataagaatgtgcggggtctgcatgtttgctacctaaattgccaactaaatcgaaacaggaagtacaaaagtccctgacctgcctgatgcatgctgcaaattaacatgatcggcgtaacatgactaaagtacgtaattgcgttcttgatgcactttccatcaacgtcaacaacatcattagcttggtcgtgggtactttccctcaggacccgacagtgtcaaaaacggctgtcatcctaaccattttaacagcaacataacaggctaagaggggccggacacccaataaaactacgcttcgttgacatatatcaagttcaattgtagcacgttaacagtttgatgaaatcatcgtatctaaatgctagctttcgtcacattattttaataatccaactagttgcatcatacaactaataaacgtggtgaatccaattgtcgagatttattttttataaaattatcctaagtaaacagaaggatatgtagcattttttaacaattcaaccgttagtacagtcaggaaatagtttagccttttttaagataagtaaagggctttttctgcgacttacgttaaggatttgtaaattcgcaccgcgtaataagttgacagtgatcaccctgttcgcggttatttggtcaagaagagtggcaatatgcgtataacgattattctggtcgcacccgccagagcagaaaatattggggcagcggcgcgggcaatgaaaacgatgggttttagcgaactgcggattgtcgatagtcaggcacacctggagccagccacccgctgggtcgcacatggatctggtgatattattgataatattaaagttttcccgacactggctgaatcgttacacgatgtcgatttcactgtcgccaccactgcgcgcagtcgggcgaaatatcattactacgctacgccagtagaactggtaccgctgttagaggaaaaatcttcatggatgagccatgccgcgctggtgtttggtcgcgaagattccgggctgactaacgaagagttagcgttggctgacgttcttactggtgtgccgatggtggcagattatccttcgctcaatctggggcaggcagtgatggtctattgctatcaattagcaacattaatacaacaaccgacgaaaagtgacacaacggcagaccaacatcaactgcaagctttacgcgaacgagtcatggcattgctgacgactctggcagtggcagatgacataaaactggtcgactggttacagcaacgcctggggcttttagagcaacgagacacggcaatgttgcaccgtttgctgcatgatattgaaaaaaatatcaccaaataaaaaacgccttagtaagtatttttcagcttttcattctgactgcaacgggcaatatgtctctgtgtggattaaaaaaagagtgtctgatagcagcttctgaactggttacctgccgtgagtaaattaaaattttattgacttaggtcactaaatactttaaccaatataggcatagcgcacagacagataaaaattacagagtacacaacatccatgaaacgcattagcaccaccattaccaccaccatcaccattaccacaggtaacggtgcgggctgacgcgtacaggaaacacagaaaaaagcccgcacctgacagtgcgggcttttttttcgaccaaaggtaacgaggtaacaaccatgcgagtgttgaagttcggcggtacatcagtggcaaatgcagaacgttttctgcgggttgccgatattctggaaagcaatgccaggcaggggcaggtggccaccgtcctctctgcccccgccaaaatcaccaaccacctggtggcgatgattgaaaaaaccattagcggccaggatgctttacccaatatcagcgatgccgaacgtatttttgccgaacttttgacgggactcgccgccgcccagccgggattcccgctggcgcaattgaaaactttcgtcgatcaggaatttgcccaaataaaacatgtcctgcatggcattagtttgttggggcagtgcccggatagcatcaacgctgcgctgatttgccgtggcgagaaaatgtcgatcgccattatggccggcgtattagaagcgcgcggtcacaacgttaccgttatcgatccggtcgaaaaactgctggcagtggggcattacctcgaatctaccgtcgatattgctgagtccacccgccgtattgcggcaagtcgcattccggctgatcacatggtgctgatggcaggtttcaccgccggtaatgaaaaaggcgaactggtggtacttggacgcaacggttccgactactccgcggcggtgctggctgcctgtttacgcgccgattgttgcgagatttggacggacgttgacggggtctatacctgcgacccgcgtcaggtgcccgatgcgaggttgttgaagtcgatgtcctaccaggaagcgatggagctttcctacttcggcgctaaagttcttcacccccgcaccattacccccatcgcccagttccagatcccttgcctgattaaaaataccggaaatcctcaagctccaggtacgctcattggtgccagccgtgatgaagacgaattaccggtcaagggcatttccaatctgaataatatggcaatgttcagcgtttccggcccggggatgaaagggatggttggcatggcggcgcgcgtgtttgcagcgatgtcacgcgcccgtatttccgtggtgctgattacgcaatcatcttccgaatacagtatcagtttctgcgttccgcaaagcgactgtgtgcgagctgaacgggcaatgcaggaagagttctacctggaactgaaagaaggcttactggagccgctggcggtgacggaacggctggccattatctcggtggtaggtgatggtatgcgcaccttgcgtgggatctcggcgaaattctttgccgcgctggcccgcgccaatatcaacattgtcgccattgctcagggatcttctgaacgctcaatctctgtcgtggtaaataacgatgatgcgaccactggcgtgcgcgttactcatcagatgctgttcaataccgatcaggttatcgaagtgtttgtgattggcgtcggtggcgttggcggtgcgctgctggagcaactgaagcgtcaacaaagctggctgaagaataaacatatcgacttacgtgtctgcggtgttgccaactcgaaggcactgctcaccaatgtgcatggcctaaatctggaaaactggcaggaagaactggcgcaagccaaagagccgtttaatctcgggcgcttaattcgcctcgtgaaagaatatcatctgctgaacccggtcattgttgactgcacttccagccaggcagtggcggatcaatatgccgacttcttgcgcgaaggtttccacgttgtcacgccgaacaaaaaggccaacacctcgtcgatggattactaccatctgttgcgtcatgcggcggaaaaatcgcggcgtaaattcctctatgacaccaacgttggggctggattaccggttattgagaacctgcaaaatctgctcaatgctggtgatgaattgatgaagttctccggcattctttcaggttcgctttcttatatcttcggcaagttagacgaaggcatgagtttctccgaggcgactactctggcgcgggaaatgggttataccgaaccggatccgcgagatgatctttctggtatggatgtagcgcgtaagctattgattctcgctcgtgaaacgggacgtgaactggagctggcggatattgaaattgaacctgtgctgcccgcagagtttaacgctgagggtgatgttgccgcttttatggcgaatctgtcacagctcgacgatctctttgccgcgcgcgtggcgaaggcccgtgatgaaggaaaagttttgcgctatgttggcaatattgatgaagatggtgcctgccgcgtgaagattgccgaagtggatggtaatgatccgctgttcaaagtgaaaaatggcgaaaacgccctggccttttatagccactattatcagccgctgccgttggtgctgcgcggatatggtgcgggcaatgacgttacagctgccggtgtctttgccgatctgctacgtaccctctcatggaagttaggagtctgacatggttaaagtttatgccccggcttccagtgccaatatgagcgtcgggtttgatgtgctcggggcggcggtgacacctgttgatggtgcattgctcggagatgtagtcacggttgaggcggcagagacattcagtctcaacaacctcggacgctttgccgataagctgccgtcagaaccacgggaaaatatcgtttatcagtgctgggagcgtttttgccaggagcttggcaagcaaattccagtggcgatgactctggaaaagaatatgccaatcggttcgggcttaggctccagcgcctgttcggtggtcgcggcgctgatggcgatgaatgaacactgtggcaagccgcttaatgacactcgtttgctggctttgatgggcgagctggaaggacgaatctccggcagcattcattacgacaacgtggcaccgtgttttcttggtggtatgcagttgatgatcgaagaaaacgacatcatcagccagcaagtgccagggtttgatgagtggctgtgggtgctggcgtatccggggattaaagtctcgacggcagaagccagggctattttaccggcgcagtatcgccgccaggattgcattgcgcacgggcgacatctggctggcttcattcacgcctgctattcccgtcagcctgagcttgccgcgaagctgatgaaagatgttatcgctgaaccctaccgtgaacggttactgcctggcttccggcaggcgcggcaggcggtcgcggaagtcggcgcggtagcgagcggtatctccggctccggcccgaccttgttcgctctgtgtgacaagccggataccgcccagcgcgttgccgactggttgggtaagaactacctgcaaaatcaggaaggttttgttcatatttgccggctggatacggcgggcgcacgagtactggaaaactaaatgaaactctacaatctgaaagatcacaacgagcaggtcagctttgcgcaagccgtaacccaggggttgggcaaaaatcaggggctgttttttccgcatgacctgccggaattcagcctgactgaaattgatgagatgctgaagctggattttgtcacccgcagtgcgaagatcctctcggcgtttattggtgatgaaatcccgcaggaaatcctggaagagcgcgtgcgcgcggcgtttgccttcccggctccggtcgccaatgttgaaagcgatgtcggttgtctggaattgttccacgggccaacgctggcatttaaagatttcggcggtcgctttatggcacaaatgctgacccatattgcgggtgataagccagtgaccattctgaccgcgacctccggtgataccggagcggcagtggctcatgctttctacggtttgccgaatgtgaaagtggttatcctctatccacgaggcaaaatcagtccactgcaagaaaaactgttctgtacattgggcggcaatatcgaaactgttgccatcgacggcgatttcgatgcctgtcaggcgctggtgaagcaggcgtttgatgatgaagaactgaaagtggcgctggggttaaactcagctaactcgattaacatcagccgtttgctggcgcagatttgctactactttgaagctgttgcgcagctgccgcaggaggcgcgcaaccagctggttgtttcggtaccaagcggaaacttcggcgatttgacggcgggtctgctggcgaagtcactcggtctgccggtgaaacgttttattgctgcgaccaacgtgaacgataccgtgccacgtttcctgcacgacggtcagtggtcccccaaagcgactcaggcgacgttatccaacgcgatggacgtgagtcagccgaacaactggccgcgtgtggaagagttgttccgccgcaaaatctggcaactgaaagagctgggttatgcagccgtggatgatgaaaccacgcaacagacaatgcgtgagttaaaagaactgggctacacctcggagccgcacgctgccgtagcgtatcgtgcgctgcgtgaccagttgaatccaggcgaatatggcttgttcctcggcaccgcgcatccggcgaaatttaaagagagcgtggaagcgattctcggtgaaacgttggatctgccaaaagagctggcagaacgtgctgatttacccttgctttcacataatctgcccgccgattttgctgcgttgcgtaaattgatgatgaatcatcagtaacatctattcattatctcaatcaggccgggtttgctttaatgcagcccggcttttttgtgaagaaaatatggagagaaacgacagggaaaaaggagaaattctcaataaatgcggtaacttagagattaggattgcggagaataacaaccgccgttctcatcgcgtaatctccggatatcgacccataacgggcaatgataaaaggagtaacctgtgaaaaagatgcaatctatcgtactcgcactttccctggttctggtcgctcccatggcagcgcaggctgcggaaattacgttagtcccgtcagtaaaattacagataggcgatcgtgataatcgcggttattactgggatggcggtcactggcgcgaccacggctggtggaaacaacattatgaatggcgaggcaatcgctggcacccacacggaccgccgccaccgccgcgtcaccataagaaagctcatcatgatcatcacggcggtcatggtccaggcaaacatcaccgctaaatgacaaatgccgggtaacaatccggcattcagcgcctgatgcgacgctggcgcgtcttatcaggcctacgtgaattctgcaatatattgaatctgcatgcttttgtaggccggataaggcgttcacgccgcatccggcattgactgcaaacttaacgctgctcgtagcgtttaaacaccagttcgccattgctggaggaagcttcatcaaagaagtaaccttcgctattaaaaccagtcagttgctctggtttggtcagccgattttcaataataaaacgactcatcagaccgcgtgctttcttagcgtagaagctgattatcttaaatttgccgttcttctcatcgaggaacaccggcttgataatctcggcattcaatttcttcggcttcaccgatttaaaatactcatctgacgccagattaatcaccacattatcgccttgtgctgcgagcgcctcgttcagcttgttggtgatgatatctccccagaattgatacagatctttccctcgggcattctcaagacggatccccatttccagacgataaggctgcattaaatcgagcgggcgcagtacgccatacaagccggaaagcattcgcaaatgctgttgggcaaaatcgaaatcgtcttcgctgaaggtttcggcctgcaagccggtgtagacatcacctttaaacgccagaatcgcctggcgggcattctccggcgtgaaatctggctgccagtcatgaaagcgagcggcgttgatacccgccagtttgtcgctgatgcgcatcagcgtgctaatctgcggaggcgtcagtttccgcgcttcatggatcaactgctgggaattgtctaacagctccggcagcgtatagcgcgtggtggtcaacgggctttggtaatcaagcgttttcgcaggtgaaataagaatcagcatatccagtccttgcaggaaatttatgccgactttagcaaaaaaagagaatgagttgatcgatagttgtgattactcctgcgaaacatcatcccacgcgtccggagaaagctggcggccgatatccggataacgcaacggatcaaacaccgggcgcacgccgagtttacgctggcgtagataatcactggcaatggtatgaaccacaggcgagagcagtaaaatggcggtcaaattggtaatagccatgcaggccattatgatatctgccagttgccacatcagcggaagacttagcaaggtgccgccgatgaccgttgcgaaggtgcagatccgcaaacaccagatcgctttagggttgttcaggcgtaaaaagaagagattgttttcggcgtaaatgtagttggcaacgatggagctgaaggcaaacagaataaccacgagggtaacaaactcagcaccccaggaacccattagcacccgcatcgccttctggataagctgaataccttccagcggcatgtaggttgtgccgttacccgccagtaatatcagcatggcgcttgccgtacagatgaccagggtgtcgataaaaatgccaatcatctggacaatcccttgcgctgccggatgcggaggccaggacgccgctgccgctgccgcgtttggcgtcgaccccattcccgcctcattggaaaacatactgcgctgaaaaccgttagtaatcgcctggcttaaggtatatcccgccgcgccgcctgccgcttcctgccagccaaaagcactctcaaaaatagaccaaatgacgtggggaagttgcccgatattcattacgcaaatcaccaggctggtcagtacccagattatcgccatcaacgggacaaacccctgcatgagccgggcgacgccatgaagaccgcgagtgatcgccagcagagcaaagacagcgagaataatacctgttaccagcgggggaaaatcaaaagaaaaactcagggctcgcgcaacggcgttcgcctgaattccgctgaaaattatgccgtaggcgatgagcaaaaagacggcgaacagaacgcccatccagcgcatccccagcccgcgcgccatataccatgccggtccgccacgaaactgcccattggcatcacgttctttataaagctgtgcgagggaacattcggcaaacgaggtcgccatgccgataaacgcggcaacccacatccagaagacggctccaggtccaccggcggtaattgccagcgcaacgccggccaggttgccgctacccacgcgcgccgcaagactggtacacaatgactgaaatgaggttaaaccgcctggctgtggatgaatgctatttttaagacttttgccaaactggcggatgtagcgaaactgcacaaatccggtgcgaaaagtgaaccaacaacctgcgccgaagagcaggtaaatcattaccgatccccaaaggacgctgttaataaaggagaaaaaatctggcatgcatatccctcttattgccggtcgcgatgactttcctgtgtaaacgttaccaattgtttaagaagtatatacgctacgaggtacttgataacttctgcgtagcatacatgaggttttgtataaaaatggcgggcgatatcaacgcagtgtcagaaatccgaaacagtctcgcctggcgataaccgtcttgtcggcggttgcgctgacgttgcgtcgtgatatcatcagggcagaccggttacatccccctaacaagctgtttaaagagaaatactatcatgacggacaaattgacctcccttcgtcagtacaccaccgtagtggccgacactggggacatcgcggcaatgaagctgtatcaaccgcaggatgccacaaccaacccttctctcattcttaacgcagcgcagattccggaataccgtaagttgattgatgatgctgtcgcctgggcgaaacagcagagcaacgatcgcgcgcagcagatcgtggacgcgaccgacaaactggcagtaaatattggtctggaaatcctgaaactggttccgggccgtatctcaactgaagttgatgcgcgtctttcctatgacaccgaagcgtcaattgcgaaagcaaaacgcctgatcaaactctacaacgatgctggtattagcaacgatcgtattctgatcaaactggcttctacctggcagggtatccgtgctgcagaacagctggaaaaagaaggcatcaactgtaacctgaccctgctgttctccttcgctcaggctcgtgcttgtgcggaagcgggcgtgttcctgatctcgccgtttgttggccgtattcttgactggtacaaagcgaataccgataagaaagagtacgctccggcagaagatccgggcgtggtttctgtatctgaaatctaccagtactacaaagagcacggttatgaaaccgtggttatgggcgcaagcttccgtaacatcggcgaaattctggaactggcaggctgcgaccgtcttaccatcgcacctacactgctgaaagagctggctgagagcgaaggggctatcgaacgtaaactgtcttacaccggcgaagtgaaagcgcgtccggcgcgtatcactgagtccgagttcctgtggcagcacaaccaggatccaatggcagtagataaactggcggaaggtatccgtaagtttgctattgaccaggaaaaactggaaaaaatgatcggcgatctgctgtaatcattcttagcgtgaccgggaagtcggtcacgctacctcttctgaagcctgtctgtcactcccttcgcagtgtatcattctgtttaacgagactgtttaaacggaaaaatcttgatgaatactttacgtattggcttagtttccatctctgatcgcgcatccagcggcgtttatcaggataaaggcatccctgcgctggaagaatggctgacatcggcgctaaccacgccgtttgaactggaaacccgcttaatccccgatgagcaggcgatcatcgagcaaacgttgtgtgagctagtggatgaaatgagttgccatctggtgctcaccacgggcggaactggcccggcgcgtcgtgacgtaacgcccgatgcgacgctggcagtagcggaccgcgagatgcctggctttggtgaacagatgcgccagataagcctgcattttgtaccaactgcgatcctttcgcgtcaggttggtgtgattcgcaaacaggcgctgatccttaacttacccggtcagccgaagtctattaaagagacgctggaaggtgtgaaggacgctgcgggtaacgttgtggtacacggtatttttgccagcgtaccgtactgcattcagttgctggaagggccatacgttgaaacggcaccagaagtggttgctgcattcagaccgaagagtgcaagacgcgacgttagcgaataaaaaaatccccccgagcggggggatctcaaaacaattagtgggattcaccaatcggcagaacggtgcgaccaaactgctcgttcagtacttcacccatcgccagatagattgcactggcaccacagatcagaccaatccagccggcaaagtggatgattgcggcgttaccggcaatgttaccgatcgccagcagggcaaacagcacagtcaggctaaagaaaacgaattgcagaacgcgtgcgcctttcagcgtgccgaagaacataaacagcgtaaatacgccccacagacccaggtagacaccaaggaactgtgcatttggcgcatcggtcagacccagtttcggcatcagcagaatcgcaaccaacgtcagccagaaagaaccgtaagaggtgaatgcggttaaaccgaaagtgttgccttttttgtactccagcagaccggcaaaaatttgcgcgatgccgccgtagaaaatgcccatggcaagaataataccgtccagagcgaaataacccacgttgtgcaggttaagcagaatggtggtcatgccgaagcccatcaggcccagcggtgccggattagccaacttagtgttgcccataattcctcaaaaatcatcatcgaatgaatggtgaaataatttccctgaataacagtagtgttttcagggcgcggcataataatcagccagtggggcagtgtctacgatcttttgaggggaaaatgaaaattttccccggtttacggtgtcagacctgagtggcgctaaccatccggcgcaggcaggcgatttgcagtacggctggaattgtcacgcgataggcactgccgctgaccgctttaaccccatttaatgctgcgcccacagggcctcccagacccgcgccgcgcagcaaaccatgcccaagcacgctcattgctgcgtgggtgcgtaaaatgcgggtcaattggctggaaagcaaatgcgacacgccttttgccaataatttgtctttcatcagcagcggcagcagctcttccagctcattcaccctggcatcgaccgcgtgcagaaactcctgcttatgttcctcgtccatattcttccaggtgttacgcagaaattgttccagtaactgttgctcaatctcaaacgtagacatctctttgtcggctttcagcttcaatcgttttgaaacatcgagcaaaatggcccgatacaatttaccgtgtccgcgcagtttgttggcgatactatcgccaccaaaatgctgtaattctccagcaatcagctgccagttgcggcgatgttgctcgggatgcccttccatcgatttaaacagttcgttgcgcatcagtacgctggagaggcgagttttgcctttttcattatgggtgagcaatcgggcgaaatttgccaactgttcctcactacaatgctgaagaaaatccagatctgaatcattcaggtaattaacattcattttttgtggtttctatattctggcgttagtcgtcgccgataattttcagcgtggccatatccgatgagttcaccgtatgaccggaaaaggtgatttttgagacgcagcgtttattgtcgttatcactgttaatgttgatccagtcagtggtttgcccttcttttatttctgaaggaatattcagactctgactggcgctacgggcggctttgaaataaaccgatgcaccgcttaactgtaaatcgccatggtcggcagagagttgtatgcgtttcacaatgcgacaaacaggaagtttcagcgccagatcgttggtttcgttacgcggcattgcaatgacgccgaggagtttatggtcgtttgcctgcgccgtgcagcacagcatcaggctaatcgccaggctggcggaaatcgtaaaaacggatttcataaggattctcttagtgggaagaggtagagggatgaatacccactagtttactgctgataaagagaaggttcaggtacgtaatcttttctttttattacaattttttgatgaatgccttggctgcgattcattctttatctgaataaaattgctgtcaattttacgtcttgtcctgccatatcgcgaaatttctgcgcaaaagcacaaaaaatttttgcatctcccccttgatgacgtgggttacgaccccatttagtagtcaaccgcagtgagtgagtctgcaaaaaaatgaaattgggcagttgaaaccagacgtttcgcccctattacagactcacaaccacatgatgaccgaatatatagtggagacgtttagatgggtaaaataattggtatcgacctgggtactaccaactcttgtgtagcgattatggatggcaccactcctcgtgtgctggagaacgccgaaggcgatcgcaccacgccttctatcattgcctatacccaggatggtgaaactctggttggtcagccggctaaacgtcaggcagtgacgaacccgcaaaacaccctgtttgcgattaaacgcctgattggccgccgcttccaggacgaagaagtacagcgtgatgtttccatcatgccgttcaaaattattgctgctgataacggcgacgcatgggtcgaagttaaaggccagaaaatggcaccgccgcagatctctgctgaagtgctgaaaaaaatgaagaaaaccgctgaagattacctgggtgaaccggtaactgaagctgttatcaccgtaccggcatactttaacgatgctcagcgtcaggcaaccaaagacgcaggccgtatcgctggtctggaagtaaaacgtatcatcaacgaaccgaccgcagctgcgctggcttacggtctggacaaaggtactggcaaccgtactatcgcggtttatgacctgggtggtggtactttcgatatttctattatcgaaatcgacgaagttgacggcgaaaaaaccttcgaagttctggcaaccaacggtgatacccacctgggtggtgaagacttcgacagccgtctgatcaactacctggttgaagaattcaagaaagatcagggcattgacctgcgcaacgatccgctggcaatgcagcgcctgaaagaagcggcagaaaaagcgaaaatcgaactgtcttccgctcagcagaccgacgttaacctgccgtacatcactgcagatgcgaccggtccgaaacacatgaacatcaaagtgactcgtgcgaaactggaaagcctggttgaagatctggtaaaccgttccattgagccgctgaaagttgcactgcaggacgctggcctgtccgtatctgatatcgacgacgttatcctcgttggtggtcagactcgtatgccaatggttcagaagaaagttgctgagttctttggtaaagagccgcgtaaagacgttaacccggacgaagctgtagcaatcggtgctgctgttcagggtggtgttctgactggtgacgtgaaagacgtactgctgctggacgttaccccgctgtctctgggtatcgaaaccatgggcggtgtgatgacgacgctgatcgcgaaaaacaccactatcccgaccaagcacagccaggtgttctctaccgctgaagacaaccagtctgcggtaaccatccatgtgctgcagggtgaacgtaaacgtgcggctgataacaaatctctgggtcagttcaacctggatggtatcaacccggcaccgcgcggcatgccgcagatcgaagttaccttcgatatcgatgctgacggtatcctgcacgtttccgcgaaagataaaaacagcggtaaagagcagaagatcaccatcaaggcttcttctggtctgaacgaagatgaaatccagaaaatggtacgcgacgcagaagctaacgccgaagctgaccgtaagtttgaagagctggtacagactcgcaaccagggcgaccatctgctgcacagcacccgtaagcaggttgaagaagcaggcgacaaactgccggctgacgacaaaactgctatcgagtctgcactgactgcactggaaactgctctgaaaggtgaagacaaagccgctatcgaagcgaaaatgcaggaactggcacaggtttcccagaaactgatggaaatcgcccagcagcaacatgcccagcagcagactgccggtgctgatgcttctgcaaacaacgcgaaagatgacgatgttgtcgacgctgaatttgaagaagtcaaagacaaaaaataatcgccctataaacgggtaattatactgacacgggcgaaggggaatttcctctccgcccgtgcattcatctaggggcaatttaaaaaagatggctaagcaagattattacgagattttaggcgtttccaaaacagcggaagagcgtgaaatcaaaaaggcctacaaacgcctggccatgaaataccacccggaccgtaaccagggtgacaaagaggccgaggcgaaatttaaagagatcaaggaagcttatgaagttctgaccgactcgcaaaaacgtgcggcatacgatcagtatggtcatgctgcgtttgagcaaggtggtatgggcggcggcggttttggcggcggcgcagacttcagcgatatttttggtgacgttttcggcgatatttttggcggcggacgtggtcgtcaacgtgcggcgcgcggtgctgatttacgctataacatggagctcaccctcgaagaagctgtacgtggcgtgaccaaagagatccgcattccgactctggaagagtgtgacgtttgccacggtagcggtgcaaaaccaggtacacagccgcagacctgtccgacctgtcatggttctggtcaggtgcagatgcgtcagggattcttcgctgtacagcagacctgtccacactgtcagggccgcggtacgctgatcaaagatccgtgcaacaaatgtcatggtcatggtcgtgttgagcgcagcaaaacgctgtccgttaaaatcccggcaggagtggacactggagaccgcatccgtcttgcgggcgaaggtgaagcgggcgagcatggcgcaccggcaggcgatctgtacgttcaggttcaggttaaacagcacccgattttcgagcgtgaaggcaacaacctgtattgcgaagtcccgatcaacttcgctatggcggcgctgggtggcgaaatcgaagtaccgacccttgatggtcgcgtcaaactgaaagtgcctggcgaaacccagaccggtaagcttttccgtatgcgcggtaaaggcgtcaagtctgtccgcggtggcgcacagggtgatttgctgtgccgcgttgtcgtcgaaacaccggtaggcctgaacgagaagcagaaacagctgctgcaagagctgcaagaaagcttcggtggcccaaccggcgagcacaacagcccgcgctcaaagagcttctttgatggtgtgaagaagttttttgacgacctgacccgctaacctccccaaaagcctgcccgtgggcaggcctgggtaaaaccagggtgcgttgaagatatgcgagcacctgaaaagtggcggggatcactcccataagcgctaacttaagggttgaaccatctgaagaatgcgacgcctcggtgcgcaccgaggcgtcgcattcttcagatggttcaacccttaagttagcgcttatgggatttctccccgctggtcctcttactccccaagttcgtaagctgtgaagacagcgacctctgtctggtcggttcggattcgtacctcgcagaggtctttcctcgttaccagtaccgtcactataacggttaaacagatgacgatcagggtgattaacatcgccttttgctgcttcatagcctgcttctccttgaccttttggtcggtaagaggctaatctacgtatgcaaagcatagatgtggcctcagattaatgttaagcgtcttgccggacgcgtaatgttaactggggcttttctctatctgcctttggtgttcatgcccgaggcagacagcctcaagcacccgcagctattctacttaactcccgttacctcgccaatatgaaatcaatcagaaaggtgatccataagagcaatagcaagaccatagattgccattacagccgctatagtttctctgatttattctgtggaaatgggacacaacaccccgtcaccaccaccacttccttaaatgcgctaagtcagtcacaagccaacactttagtccgctttgagcgaaaagctgacaggagtttaaataatcagttaaggcattacaaaaagcatgtgctaatagagataaccagagtcaatatataatctcttagctctatttacacttacgtacattattcttgctttttgggaggtcttggatatttcgcaggtaatttttctgtaatcttaaatatatcctcattttttagtattgttcgcattacaaaattttctataattaccaaaagcgatttaaattcagtttcgttcggtgcccatgtcctgtgtgcagctgagttgccagcttcggttacaattttaagttggctcctttctgtttccccaataaaaccttcctctttaagaatgtcaaccttctggcctaatgtatatcctggatgaatatttagaacctcaactgttctgtcaaaaatagttctaagtccaatcgccgctaaaatgaatgatttattttgaaatgcgatgtacatttcgttcattattacatacagctgacgatctttgtttaatatctcaccaaaccaagttggtctaatctcttcttgctcttgagtgggatatgttgatatatgatagttatataccatacaatcatagcctgactcatctctttcaatgtcgtaatcttcactgtgacgggatttaatatatgtaaatattccgtcgcaccccatacactctaataatttgtattcactttcagcccaaaaatagttgcccccatcatcctcactccattctctttttttatggcctattatgtggcaatttttttcacctttacaatatggacaaggagctttaattttttccatggtaattattctgccatttaaattaaaattgatataacatatatgctatatgatttataaatgatgaacttacggctcactttactacaataattttcatatgagtagtgatatgcctctcattttctttgtcgttgattgatctgctctacattgattaacaccgaatgggagtaactcccgcttttggcagagtgcgaacaagctgaccaaaccttaggtccgcagtgagcgaggagcgagcattggccttataaggcatcggagctgttctccggagatcctctgaaagcgaactgttcggttaagcaggacgcttacaaggcaagcttagcgtgttgtcttgtgatgggttgcttaaaccttttgtgaaggtatttttctatcgaaagataattaactgaggttgttatgtcatacattcgcgtcgagaaagatgaccttcagcattaatcagattatttctgtgaagaggatatggttacagtctgtagaacttaggggattgtagtccagtgtggttgttaatgagatggcagaagtagctgctgttcgtactgcgttgcgaaatctcattagagaaaatcgggttgatcctctaactgattgaatatacattcctattgctcacgagttggaatgagctgtgactttttagctttaaacttaactttaagacaattttatgatcacgttagggtgtaagaaggatatatgagcggagaagtatttcataaaagattgtttcccgttggccagggtggatttagtttaggcggactgaggggaagggatggtagtttgctttacagttatgtgtatgactgcggaagtgaccaattaaatgcgttgcgtagggagatggatgtggctaaatctctctttaatattgatgagaaatatattgatgtggtatacatctctcatttggattcagaccatataaatggatttgaccatttatgtcagcttgtagataacaaaatacgcaaggttgtattaccatacctagatatccatgatagctattacttaattgcatcggagctatgctctaattctacgtcaggtctttttatggaatttctcattgatcctgtcaaatggataaaatcaaggttgcctgaggcagatatatctttgctttaccccagtgatattgatgataattttgaccctcctatatttaatagtgaaaacattaagggtagcgctgtaagcttaccaatgaaaatatctgactccaaaggagatgttgaatgtaaccgttggttggttaaaaggattggggaaaacaaaactgatacactaatgtcatttatttcttggataccgccccgttcacgtaagaaaattgaaattttcagtcagcagttaatagaaaatggttttactgagttaagtaagaaaaaaatgcttaaaatattaactagcacgggggaaagaaagaaattacgcgagtgttatttaaaacttgctggcgatcataatgtaatatcaatcaatctcttgattattaataatcaagaagctgagatgaaaattgttaatgagccttctcgtgagtggtttagttttagaaatagtcgggttgagcgacattttctctttgatagagataaaggaattagatctgttttattaacaggtgactcaaagcttaatacatcattgtattataataaatgggctgaattctattcaaaagtgattaaaacggtaagggtgatgacattacctcatcatggttcggaattaaatttcaatcaaaaaataattgcggattttgataatgttttgtttatagctcagtcggatggtcattcacatggacacccatcacaatcagtaatcgatgctataaattcaagtcatggacatagcgttactttagttgacaataatgctaaaaattgggttgatataaaatatatattttaaacattagttgtattaatagcatttaaataaattaagtttgttggtatgttaaaagtttttgctagataaccaggtcttttttgaccgatgatacagtctttgttccacggtgacgtgttcacactcaaatctcctgcaatgtgggagatttgagtatggttgtccctgatgtgcgataagcggacctaacattattatgttttgaataataagagacagtcagttggctgtaagtctgacttagttatccaaaacagcttttctttgtattattgttctaataaatgctgctgatatatgcaacacgaattcagcatcgtattccaagacagaagaaaccttgttgctaccatgtcttactgctggctctgcatttgtataagcgtaaaatttctctatcaccgttaaaagcataggtgagatagtgttttcttttctcatcagttttaatacatcgcccaaggttgaggctgaaggataataagtccgacacatgctttctattgcacttattgattcttttatggaattttctggatccttatgcgcacctaatgcaaaagcccgggctttcacatagtgcctccttgcaggttcaaactggtcttgcaataagttgttagtttcatcgattttttgttctaattcatttggtagtggtgtttctaacctaccagcagaattcattttccagtcaatatttcgagatgcgaataactcgttcaatttctgacgatatgatgtaaaagtaatgtcttctaatgccttcttaccccaagtatggcctctttctacatctctttttcttaatagatctccgataatctcaacagcatcataaaattgaaaccaacgcatatgttgcaaacgcgctttcaaagcatcatagcagtaccatgaatcgaaatcctcatgatctgtttcttgaccattctctgcgcaaagtcgctcgatcaaagccttaatacccaacggcttgttctcatcattcgtaatgcggctatcaccatcaatgtacaaaaaattatcgaggacagttacaaaaaataaagagcgaagccactctggagcatcttcccgtatcggctttttattatactcaggatcaaaaccatgtctgtacgagaacttcatcccacatctcccattcaactgtatgaatattaggtaattatacaaccaacacaaatccctttgcgaatacaaaaaaatcaaaaaatcacaacaaatttaagaactgatcgcttatttctctatggatgtccgcttctggcacgaagcggacaagttaccgtagctgaaggtcactaatactgggggcaggtcagttcgcgtttgttctcataacggagtaagacgctaatggtattaaggtgtattaatgatcaatgtagatcaacgattattggcgtttaacgctcagatgagaacgttcaccgattctgcacgaacaaattcagaatggggggatttgatatccccctggtagatgccttggttaatgtttataggtcaattgaactcagagcatcattcttgccgcattagagatggtcaaaaatagaccctttgcgtggaataaggatcttctcataaagctttgttgcatagtcatcagtcatccctgaaacatagtcgcaaatgactcgcataccagccttctcgtccaagctagtctgccgctcgtaaatttccctcgttgatgccggtagaaaccgacacggatcgttagccagcacaccgaaaagctcaacaatcaacttttgtcccttgaattcaagctgctgtacattttcatgcttaattactttatttttgaccagtttgaaaattttcaaccgtagtgcttcgaccgcttccggaaggaccgcattatatttgagcatgccacattcgaatgctggattctttgtaataagctcaacgcttgtaatcatcaggtgaaccagcatcccgatgcactcttttctcttgtaactttcaccaaaaaggctatccgcgacagattcacatgttgcggaaaatgtttctccatggcagttagtaaatagggtttcatattcactgaaatgctccatccacatttctcgtgtcaccattccgagagaaatagcatcctccaaatcgtgcagcgaatacgaaatttcatcggcaagatccatgatggttgtatcgagagctttataagaagcttttttatgatcggatttagtttgaccatcttcaacggaagtaaaaagcctccgatcctgttcagtaaatggtgaaagagcaaattctacaacatcgcattctgaatctagatagcattttggaggtttaaaatcagatgacttaaagagccagttcggcgatccgatagtggccgggattctgtcttttgtaaccactagatccgagtatttaaccggatatttcagtatgcctagcagaagtctgcgtgtaggatcgagtccgtgttcaacggtatacttatctagtttcgagagaatgcgaagtgtctgaccgtttccttcaaaaccaccgtaatcctgcatacagtagttaagagctacctcaccgccgtgaccaaatggaggatgtccaatatcatgtgcgagacatactgcctgcataagatcgttatctggtaaaaattgctcttgctctttacctttatattttattttcagcttagcaagaagacctgaaccgatttgtgcgacttccatagaatgagtcagtcgtgtgcggtagaaatcactttcacccagaccaagaacctgtgttttggattgcaatcgtctgaaagcagacgagtgaatcagtcgagaaaggtcgtgctgagcttcagatcgaatctcctccacacgatgactattggtgcctcgtctcttatcccagacgtttatttcactccgagtcatattattcctcatttttactttgtacactgcggcattctaacgtaactaaattatcaaaataacctatttatttctgacctaatcttcaataatcaatgttgtgtgaacttagttaggcccgcccctggcacaaaacagacaaccacgctagccgtatcctgtgccatgaaactgtcaattcacatatgaattaatggtctttaatctcgtcacttcaataaataccgaacatttccctgatagaatgctaatacacgctgcataacttcactcttccggcactcacggcaaattatgttcagacgcctgtcgtagcgacgtatttctccgtctggtaatgaccaaataaggtccagatcaaccacaactggtttcttcacctttgccctcgatagttttttgcgggcgttttgccagtcttgacgtgcctgctcagacggaaataacccatagccagagttgtatacatcaccattcgcaaccaactccctagcaagagcgcttatcagatatcttgtcgcccccgttttagcttccagttgtcgtaacgtctctcgcccgctctggcgtacaagatcaacaatctgccctttaattttttctcgctcttcctgtgtaaatacttttgccataagccctccccaggaatcacttttccgacacaatacgactggaggaatcgacaatctgacggacaatatcctggtgcttgttcagctcacgcagcgcggcgcagactcgctcccacttctggacataacttttcgcccggcgcagttcgcggtttgccatttgcagcgatggtataatcaggtcattggctcgcgtttcagtgaacgatggtagtgactgcacaatgtcccccacagtatctgttttaatttcttcctgtgttgccgcttcctgtactggtaacgcaacaccggctggctgaggaaagcctttaccaggtgttttcactaccgatacaactttcggctctgctggtaaattaccgtccggcaggcagtaacgaaatttaccgttctgatttacgcgaatcagacgacctttgctgatggccatagccagcgatgagttcaccctgcgggaagtaattctgaatatcagtgcaagttcatcagccgctttagggccatgctgttcaatcgcctcgatcagcatttgcgctgtcactttagaagcctgtgctacagatgcgttttcgtcggtttgagtcaaccaccacatcgggcccttgttatcagcttccccacgacgcttcagtttccacagctcgttaatcgcctcatcccgggtcattcccagacgtgctgccacttcctgggaagaggcttttcccattgctttcagtgcgtcaaaaacggtctccattaaaatttcctcccggtaaaaattacttctcaattcctggctgaccaacattcgggcgccagctctcccagttaaaattcacccatcgcccgccgttcatggtcatccgatccataatcctctcgccgagcaatgttttcatggcctcatagttcaggtttgtcagcatccccacgctgcggatcgacgctgtccggcgatcaacaatctggtgcagtaccacctgctcgttttttgtctcgcgctgaatgccaatttcatcaagaaccagcagatccacttcgcacagttcccgcaaaaatttttcgcctgattgcccgtcgtcatagctggcgtgtagagcactcataacatcagccacggtaaccacaatcactgtctgaccgtttttcagcaggcgattcccgatagccgccgccagatggttttttccggtaccaggttttccgctaaacgcaaaatttgtacacccgaccatcagttcatcggcgatggatttcgcctggctcaacgcgtatcgctggccgtcgttctgcacctggtaattcgaaaacgagcatttgcggtgcaacggctggatgccggagcgattcagaattttttccacccgcaactgacgattctggcgattgatctcctcgcaacgtttctggccttctgcaagttgccactcgcgccactccgccaccgtcctgaatggcgcggttacatgtggcggggccagtctgcggatacgttccagaacgccgcctgtcgcaatatttttcatggtcagttaccccctgaagcctggcgggatcgcactgtccggaaacgagacagtgttaacctgtcggagcaacgtctcaggccgaacacttttcggcgcgaacaagccctggtattcattggcgatgctgtgtcgaatcacctgctcaggggtaaaaccctgctggcggaatttttccagttcccgtatcgccccgttagcgccctgctccgttcgaatcggttttcgcaatgcctgcctgaactggacccactcattccagagtgtttctggcaaccagtcgggcagagcaatggcctccggctcgaattgtttagacgctcgtttttgccgagggggatttagggggagatcagtatttatatcttcctcttcctcttcctctggtaacgctttttgatccgtttgtgtaacgctggcagcgttaccttttcgcttcagttcgcgtatttttgtaactctctcgtttgtaaccgcccgttttttcgagctttttccgttatgacgctcaaagtttggtagtgaaagcactccatcactttcgaccagccatccaacctgaattaacgcatcagcaaaaccagccataaaagtgatacggtctattgcactttttgtaacgcctcgagcgttacactctgcgttaccgtctatcatttgttgatccgcccatgcccagaagcgaatgactttccctaatgcggcatctggatcaatattcagaatctcagcaagcctgaatatttccggcttatccggcgtaataacttcgagctttatccagtttgaagccatttgttttcaccttgtaacgctcgcagcgttacatttaactgataccgaacaaaacagttcggtacgattaatttcaatcaatgcactacgacagaatcgctaggagaaccgccgccgctgaaatgtgctttacggtaaacggcctggactgcatcatcatgcgcatcaattgccgtactcagtgcatcctgtgccgccagtaatgcacggcgttccagggtatcgaagatgcagagtcggtgacgcagctcgcgaggaagaattgccagaaccgcagggatcagtttctgaattttttccctttgcgcattcgtttcacctttcaaccaacgatgatagatattctgctgattgttccagtccttgcctggtaccaggggcaattcgcctcccccctggcgcagatattcttcagtaattgcgttagcgacccacgcctgccctttttcggctgccagggctaacaacactgattcgatgtgctcatgcttgattttcatgaatcaactcccatcagctttttcgtagtagttttatttctgccaatagttaaaattgcatcggcagaaaataatccgtttgatgcatgagcgattttttcagcgtaatttgtttcgccggtatattctgtgcgaggcaattttccgttatccatccatttgtagattgctctttggctgacaccacaaacgtcggccacaacagaaacgcgaacagttttgattacatcttcaagtgttttctggttcatatcatcctcacaatgtgaactttgagtacatgctataacagaactgacagtacattcaagagcgaatatcattgaacttatggttcatgaagataaagcgcgtaaagagttcgccagtaggcttgcgctagcctgtgaaaacgctggttatgaacaacatggaaggcaggcagaaattgcccgtcgaatgaaattaacaccaaaagcggttagcaaatggtttaatggtgaaacaattcctcgccgagagaaattaagggaattagcaacactcattggaacaacaccaacctatcttttgggagaggatacagaagaaagtggacagatacgtttctatcaggagttaaatccaagacaaaaaatcatcattgaccttctggacgagctccctgacagtgagacagatgaacttttaaaaactcttgaggagaaaaaacagaagtacaatgcaatttacgaagagttagcacgaaagaaaaaacaaaaagcctcttaaaccagcataaatccggtagcgtccccctccgggtttgtgcttcactttatcccgtctcatttttttatacataaaatgtacttaaagtactttacaatgatgaacacaaagtacattatatacctaccaacccaccccgccccacagaacgccgggcaatacttcgagttaccaggcagtggtcaggggttaagtagccagcccgaggcgtatgaacatgacggcgggattcaaattttgcagtgcagcagttagttccgccacccggcgttaaggggatagataagatggtgcattacgaagtagttcagtatttgatggattgttgcggtatcacttacaaccaggctgtgcaggctttacgcagcaacgactgggatctctggcaggcagaagtcgctatacgtagcaacaagatgtgagattcgcaaaatgcaaaaaatcgacctcggcaacaacgaatccctggtgtgcggcgtgttccccaaccaggatggaacgttcactgccatgacgtataccaaaagcaaaacatttaaaaccgaaactggtgcgcgccgatggttggagaagcacacagtaagctaacgattaaaacgtctactcctgctgttccagaataacttcataaaatgggagtatttttcggtgacgagataataagaacagtttgcgctatcactctgatgttgaatgatgcccttccgttctaattttttcataaccgggttacggcaaggagaagtgataataagatttcctgttttaaggaaatctttaaatacagcgatttctttctcagataaacgaagcaatactcgttgctctggtagtaatgaataatgcttttgaatatgtgctcgcaatcttgagaaggaaatggcgaccacgaaagaaaaggcaaaaacgataatctgaaagagccaaggtatttcagtataagcattgaatgcgacagtaaactctttcggtatcagccagagagtgagaccaaaaatgataatcgtatacataagtctttcgagtggctcgttagcaaaaagtttcaacaatggagtaaatacatccaacatatcaataactctcaactgtaagggtattgaaatgttaacacaagctctcgctgtaggggtatagccgagaccaccgaagcccggaggtggtgaaataaaaccgggcacaacacgaaggcgcatttccgatatccataaagagtcggtcttgtctgttaaatttaaatggtgggagtgcgcctccggttgtaaataacgacattgctgtgtgtagtcctggcggcatcagtttttttcttgaagttcggctgatgtccgccctttttaaagtgaattttgtgatgcggtgaatgcggctaagcgcacgtggcacagttaaaagtcatgttagtccttattggtttgggtgggaaagccgactgtaattgttaactggttgcagtcacctggaggcaccaggcaccgcatcaacaaagttcatttgtaaaaatggagataattatgattgcacatcacttcggaactgatgaaataccacgtcagtgtgtgactcctggcgattatgttcttcatgaaggccggacatatattgcctcggcaaacaatattaaaaagcgaaaactatatattcgtaacctgaccacaaaaacatgcattactgaccgcatgattaaagtcttcctcggtcgtgatggtttacctgtaaaggcggagtcatggtgatgactaagaaaataaaatgtgcttaccacctttgcaaaaaagacgttgaagaaagcaaagctattgaaagaatgcttcacttcatgcacgggattttatcaaaagacgaaccgagaaaatattgcagtgaagcttgtgccgaaaaagaccagatggcacatgaactttaattaattgactattcgaaactgaatttatgccagaaatggcaggtattcgctcaaccttaattaaggagaaaaacatgattaccaattatgaagccactgttgtaactaccgatgacattgttcacgaggtgaatctggaaggaaagcgcattggctacgtaattaaaacagaaaataaagaaaccccattcactgtggttgatatcgatggtccatcaggcaacgtaaaaacacttgatgaaggtgtcaaaaaaatgtgcctggtgcatatcggaaagaatctgcccgcagaaaaaaaagccgaatttctggcaactctaattgcaatgaaattaaaaggtgaaatctgaaagaaatagcctgcgtatggcgcaggctatgaacagtgtgtatccggcaagatcattcactgaacaaaacgaattttaatctgagttgaggttaaaaaacaatgagcacaaaaccactcttcctgttacggaaagcgaaaaaatcatccggtgaacctgacgtcgtcctgtgggcaagcaacgattttgaatcgacctgtgccactctggactacctgatcgttaagtcaggtaaaaaactgagcagctattttaaagctgttgccacgaattttcctgtcgttaatgacctgcccgctgaaggtgagatcgattttacctggagtgaacgctatcaactcagcaaagactccatgacatgggaactaaaaccgggagcagcaccagacaacgctcactatcaaggcaataccaacgtcaacggcgaagacatgactgagattgaggagaatatgctactcccaatttctggccaggaactgcccattcgttggcttgctcaacacggcagcgaaaaaccggtaacgcacgtttcacgcgacggactccaggaattacacattgctcgggctgaagaactaccggctgttactgccctggctgtttcccacaaaaccagcctgctcgacccgctggaaattcgcgaactccacaaactggttcgtgacactgacaaagttttccctaatcctggtaattcaaacctgggactgataactgcttttttcgaagcatacctgaacgctgactacaccgatcgaggactgctgacaaaagagtggatgaagggtaatcgtgtttcacacatcactcgcacggcttccggtgctaatgctggcggcggaaacctcaccgatcgcggcgaaggtttcgtacacgatctgacgtcactggcgcgcgacgtagccactggcgtactggcccgttcaatggatctggacatctataaccttcatccggcacacgctaaacgcattgaggaaattatcgctgaaaataaaccgcccttttctgttttccgcgacaaattcatcaccatgcctggcgggctggattattcccgcgccatcgtggttgcgtccgtaaaagaagcaccaattgggatcgaggtcatccccgcgcacgtcactgaatatctgaacaaagtattgactgaaaccgatcatgccaaccctgatccggaaatcgtggatattgcctgcggtcgctcctctgccccgatgccgcagcgagtaacagaagaaggaaaacaggatgatgaagaaaaaccgcaaccatctggaacaacggcagttgaacagggagaggctgaaacaatggaaccggacgcaactgaacatcatcaggacacgcagccgctggatgctcagtcacaggtaaattctgttgatgcgaaatatcaggaactgcgggcagaactccatgaagcccggaaaaacattccatcaaaaaatcctgtcgatgccgataaattgcttgctgcatcacgtggtgaatttgttgacggaattagcgacccgaacgatccgaaatgggtaaaggggatccagactcgcgattgtgtgtaccagaaccagccagaaacggaaaaaaccagcccagatatgaatcaacctgagccagtagtgcaacaggaaccggaaatagcctgcaatgcctgcggccagactggcggggataactgccctgactgtggtgcggtgatgggcgacgcaacataccaggaaacattcgctgaagagagtcaggttgaagctaaggaaaatgatccggaggaaatggaaggcgctgaacatccgcacaatgagaatgctggcagcgatccgcatcgcgattgcagtgatgaaactggcgaagtcgcagatcccgtaatcgtagaagacatagagccaggtatttattacggaatttcgaatgagaattaccacgcgggtcccggtatcagtaagtctcagctcgatgacattgctgatactccggcactatatttgtggcgtaaaaatgcccccgtggacaccacaaagacaaaaacgctcgatttaggaactgctttccactgccggctacttgaaccggaagaattcagtaaccgctttatcgtagcacctgaatttaaccgccgtacaaacgccggaaaagaagaagagaaagcgtttctgatggaatgcgcaagcacaggaaaaacggttatcactgcggaagaaggccggaaaattgaactcatgtatcaaagcgttatggctttgccgctggggcaatggcttgttgaaagcgccggacacgctgaatcatcaatttactgggaagatcctgaaacaggaattttgtgtcggtgccgtccggacaaaattatccctgaatttcactggatcatggacgtgaaaactacggcggatattcaacgattcaaaaccgcttattacgactaccgctatcacgttcaggatgcattctacagtgacggttatgaagcacagtttggagtgcagccaactttcgtttttctggttgccagcacaactattgaatgcggacgttatccggttgaaattttcatgatgggcgaagaagcaaaactggcaggtcaacaggaatatcaccgcaatctgcgaaccctgtctgactgcctgaataccgatgaatggccagctattaagacattatcactgccccgctgggctaaggaatatgcaaatgactaagcaaccaccaatcgcaaaagccgatctgcaaaaaactcagggaaaccgtgcaccagcagcagttaaaaatagcgacgtgattagttttattaaccagccatcaatgaaagagcaactggcagcagctcttccacgccatatgacggctgaacgtatgatccgtatcgccaccacagaaattcgtaaagttccggcgttaggaaactgtgacactatgagttttgtcagtgcgatcgtacagtgttcacagctcggacttgagccaggtagcgccctcggtcatgcatatttactgccttttggtaataaaaacgaaaagagcggtaaaaagaacgttcagctaatcattggctatcgcggcatgattgatctggctcgccgttctggtcaaatcgccagcctgtcagcccgtgttgtccgtgaaggtgacgagtttagcttcgaatttggccttgatgaaaagttaatacaccgcccgggagaaaacgaagatgccccggttacccacgtctatgctgtcgcaagactgaaagacggaggtactcagtttgaagttatgacgcgcaaacagattgagctggtgcgcagcctgagtaaagctggtaataacgggccgtgggtaactcactgggaagaaatggcaaagaaaacggctattcgtcgcctgttcaaatatctgcccgtatcaattgagatccagcgtgcagtatcaatggatgaaaaggaaccactgacaatcgatcctgcagattcctctgtattaaccggggaatacagtgtaatcgataattcagaggaataattcagcctggcggtgtaatgcaccgccaacttgaaatattttttatgagaaaaattatgagatatgacaatgttaaaccatgtccattttgtggttgtccatcagtaacggtgaaagccatttcaggatattaccgagcgaagtgtaacggatgcgaatcccgaaccggttatggtggaagtgaaaaagaagcactcgaaagatggaataaacgaaccactggaaataataatggaggtgttcatgtataaaattaccgccactattgaaaaggaaggtggcactcctactaactggacaagatattcaaaatctaaactaacgaaatcagaatgcgaaaaaatgctctcaggtaaaaaagaagcaggcgtttccagagagcagaaagtaaaactgataaattttaattgcgagaaacttcagtcctcgagaattgcattgtattcaaattaaaacttcatagctgattattaataatcaacatcgggcgtcaatttcagtctaacattggcgcctgccagaggtgatgcgatggcacaagtaatctttaatgaagagtggatggttgaatacggcctgatgcttcgcactggtctgggggccagacaaattgaagcataccgccagaactgttgggtggagggcttccacttcaaacgagtatctcctttaggtaagccagacagcaaacgagggattatctggtacaactatccaaagataaatcagtttatcaaagactcatgatatgtctaaattaccaacaggtgtcgagattagaggtagatacattcgcatctggttcatgtttcgaggaaaacgatgtcgggaaacattaaaaggctgggagattacaaacagtaatattaaaaaggccggaaatttaagatcgctgatagttcatgaaataaactccggtgaatttgagtatttaagacgttttccccagtccagcactggggcaaaaatggtgacaacgagagtcataaaaacgttcggagagctttgtgatatctggacaaaaattaaagagacagagttaacaacaaacacaatgaagaaaacgaaatcacaattaaaaacactcagaataataatttgtgaaagtaccccgatatcacatattcgttatagcgatatcttaaactaccggaatgaactgctgcatggagaaacgctttacctggataatccaagatccaacaaaaaaggaagaaccgtgcgcacagttgataactatatcgccctgctctgttcgctgttgcgttttgcgtatcagtcgggatttatatcaactaaaccatttgaaggagtaaaaaaattacagcgaaacagaataaagcctgatccgttatctaaaacagaattcaatgcattaatggaaagtgaaaaaggacagagccagaacttgtggaaatttgccgtttactcaggacttcgtcacggggaactggcagctctggcgtgggaggatgtggatctcgaaaagggaatagtgaatgtcagaagaaacctgacgatacttgatatgttcggtcccccaaaaacaaatgccgggatccgaacagtaacactactgcagcctgctcttgaagcactgaaggagcaatacaaactgaccgggcatcatcgcaaaagcgaaatcaccttttatcatcgggagtacggcagaaccgaaaagcaaaaactgcattttgttttcatgcccagggtgtgtaacggaaaacaaaaaccttattactcggtaagcagtttgggggcaaggtggaatgcagcagtaaaacgtgctggtattcgccgccgtaatccgtaccatacgcggcatacttttgcctgctggctgttgacggcaggagcgaacccggcatttatagccagccaaatggggcatgaaactgcgcagatggtgtatgaaatttacggtatgtggattgatgacatgaacgacgaacagatagccatgttgaatgcgcggttatcgtagttgcaaagtttgcccccaatttgccccatttagtaccagagaactgaaataatgcaagaaaatcaacaaattacaaagaaagaacaatacaacctgaacaaattacaaaaacgtctgcgtcgtaacgtgggcgaagccattgctgacttcaatatgattgaagaaggcgatcgcatcatggtttgcctctccgggggtaaagacagctataccatgctggagattctgcgcaatttgcagcaaagcgcgccaatcaatttttcgctggtggctgttaacctcgatcaaaagcaaccgggcttcccggaacacgttctgcccgagtatcttgaaaagctgggcgttgagtacaagattgttgaagagaatacttacggtatcgtgaaagagaagattccagagggcaaaaccacttgctcactgtgttctcgccttcgtcgcggtatcctttatcgtaccgcaacggaactgggggcgacgaagatcgcgttgggtcaccatcgtgacgatatcctgcaaacgttgttcttaaatatgttctacggcggtaagatgaaaggtatgcctccgaaactgatgagcgatgatggcaaacatatcgttattcgtccgctggcctactgccgcgagaaagatattcagcgatttgccgatgcaaaagcgttcccgattattccgtgcaacctgtgcggttcacagcctaacctgcaacgtcaggtgattgctgacatgttgcgtgactgggataaacgttatccagggcgtatcgagacgatgttcagcgcgatgcagaatgtggtgccgtcgcatctgtgcgataccaacctgttcgatttcaaaggcatcacccacggttctgaagtggttaacgggggtgatctggcgtttgatcgcgaagagatcccactacaaccggcgtgctggcagccagaagaagatgaaaatcagttggatgagttacggctgaatgtggttgaagtgaaataaccaggatagcgcccgatgcgcaagcgtatcgggctactcttatggaggccggataagacgcggccagcgtcgcatccggcaatcccgaataagatgtttactcttgcacccggcaattcaacatttcattattttaataaccgcacccggcacgtttttcctttaatcttcccgccctgtaactgtttccatgctttatgagcaacagcctgacggaccgcgacatagacatgcgccggatgcacggcgattttgccaatatctgcgccatcaagcccgatatctcctgtcagtgcacctaatacatcacccgggcgcattttggcttttttcccgccatcgatacacaacgttgccatttctgcttccagcgtcgcaatggaactattagctggcggcgtttgccagttaagttttatctgcaacatgtcagaaatgatattggcccgctgtgcttcttccggagcacagaaactgatcgccagaccgctatttcctgcacgagctgtacgaccgatgcgatgtacatgaacttcagggtcccacgccagctcaaagttcaccaccagctcaagcgatttaatatccagaccacgcgcagcaacatcagtcgcgaccagtacacgggcgctaccgttagcaaaacgtaccagggtctgatcgcgatcgcgttgctccaaatcgccgtgtaatgacaatgcactttgccctacttcattcagcgcgtcgcagacagcctggcaatcttttttggtattgcaaaacaccacgcaagaggatggctgatgcaagcttaataaccgttgcaacagaggaattttgcctttgctggatgtctcataaaattgttgttcaatgggtggcaaagcatctgttgagtcaatttcaatcgccaaaggatcgcgttgcactcgtccgctgattgcagcgatggcttccggccaggttgccgaaaacagaagcgtctgtcgagatgcaggcgcaaaacggatgacatcatcaatggcatcgctaaatcccatatccagcatgcggtcggcctcatccatcaccagcgtattcaacgcatccagtgataccgtgcctttttgcaggtgatccagcaaacgccccggcgttgccacgataatatgcggcgcatgttgcaacgaatcacgctgcataccgaacggttgaccaccgcacaacgtcaaaattttggtatttggcagaaaacgcgccagccgacgcaattcacctgccacctgatccgccagttcacgcgtaggacacagcactaaagcctgggtttgaaatagcgacgcatcaatttgctgtaacaagccgaggccaaaagccgccgttttgccgctgccggttttcgcctgcacgcgaacatcttttccggcaaggatcgccggaagcgcggcggcctgcaccggcgtcatggttaaataacccaactcattaaggttcgtgagttgggcgggaggcaaaacattcagggtagaaaaagcggtcacaatctattctcgtggtcatcgacgcaaagttagcaggcgcgtatcctcgcagatctacgctcacgatgcgacaatttaatcggttcttcatcgggtggtgggtcaggcatgggttgcgggcgagggatcggatcgggcactggaacaggatcgccaggaatcggttcagggacaggaatttgcaaataaataagtgtcgtcatatttccctctggtcattgggtggactcttaaagggtagacgctgataaataacaggcaaaaaaaagccgactcatcaaagtcggcgtcgtacgaatcaattgtgctatgcagtaattcaaaaaaggaagtaagacaatatggagcgcaacgcccatcgcttgacgttgcattcacctgcaagagagatattgccctgaatgggtagagagtttattgacttcgctcaaactttgcggcgtttttgtatacagacagccggaaaaattgcttttgttacaaccatttactacgatgcaaccataaagcaacaccaccaataagaacaactaacagaatacaaaaaattgaaaatccgaattgccacccgccgccagggatcccaccaaggttgacgccaaataacccggtcagaaaggtactgggtaaaaagaccattgccatcaacgacattgtataggtacgacgagctaaattttcctgcatcacctgagcgatttcatccgccatcacgccagtccgtgctatacaggcgtcgatttcgtcaaggccgcgcccaaggcgatcggcaatatcctgcatccgacggcgttggtcatcgctcatccacggcaaacgttcactggcaagacgagcataaacatcacgttgcggtgccatatagcgacgcatcacaattaattgtttgcgcagcagagccaggaatccacgcggtggaatttgctgatcaaggagattatcttcaaggtcgataattttatcgtgcagctgctcgataaattcactggaatgatcggtcaacgcatcgcacacatccaccagccatcccccgcaatcggtcggacccgtgccctcttccagatcgctcaccacatcgtccagcgccagcactttgcgttgtcgggtcgaaacaattaaccgcccgtccatatatacacgcatggcgaccagttgatcggggcgttcatcggtgctgccgtttatacagcgcaatgtaatcagcgtgccttcaccgagacggctgactcggggacgcgtgctctcgcccgccagcgcatcacgtacgttattgggaagcagcggtgttgtcgccagccattgggcgctatcatggtgtacataattaaggtggagccaacagggatgcgcttcatcaatcacatctgtattttccagcggtttaacgccgcctctaccatccagcatccaggcaaatactgcatccgggacattaacgtccgatcccttaatcgcttccacagtgcctccatcatcaacgcattattttgtagtctagccttctggccctgttacgcaacatctcatcaccccattaccctgaaatgattaataaaattctgtctaaattgaatacaaaaagcaaaatgcttttccgtatacaaaccgtgtgaagtgttaaatagcgtctatcattatcagaattatctgatcatatgacgtggcttttttgcgatcggatagcaacaaaaattgataaaaataacgggatctcaatgattacgcacaacttcaataccctggacttactcaccagtcctgtctggatcgtttcgccctttgaggaacagttaatttatgccaatagcgcggcgaaactgttgatgcaagacctcacgtttagtcagctacgaaccggaccctattccgtctcctcacaaaaagaactgccgaaatacctctccgatctgcaaaaccaacacgatattatcgaaatcctcactgttcagcgtaaagaagaggaaacagcattgagctgtcggcttgttttgcgaaagctgacagaaacagaaccggtgattattttcgaaggtatcgaagcgccggcaacgctgggtttaaaagccagtcgctcggcaaattatcagcgcaaaaaacaaggtttttatgcgcgcttttttctgactaactctgcaccaatgttgttgattgacccgtcacgagatggacaaatcgtcgatgctaacctcgccgcgctcaatttctatggttataaccatgaaacgatgtgccagaaacatacctgggaaataaatatgctcgggcgtcgcgtcatgcctatcatgcatgaaatctcgcatttacccggtggtcataaacctttgaattttgttcataaactggcggatggttcgactcgtcatgtgcagacctatgccggaccgattgaaatttatggcgacaagctcatgttatgtattgtgcatgatattactgagcaaaaacggctggaggagcagctggaacatgctgctcaccatgacgcgatgaccggattactgaatcggcgacagttttatcacattacggaaccaggccaaatgcagcatctcgccatcgctcaggattacagcttgttgctcatcgacaccgatcgttttaaacacattaacgatctctatgggcattctaaaggtgatgaggtgttatgcgccctcgcccgcaccctcgaaagttgcgctcgcaaaggcgatttggtgtttcgttggggaggcgaagagtttgtcttattgctaccaagaaccccactggataccgcgctttcgctggctgaaactatccgcgtaagcgtggcaaaagtgagtatttcgggcttaccacgctttaccgtcagcattggtgtggcgcatcacgaaggaaatgaaagcatcgatgaactgtttaaacgcgttgatgatgctttgtatcgggcgaaaaatgatggacgcaaccgcgtgctggcggcataagccgcggatgcgtctcgagatcaacgactgcgcttagcgtggcgctcccagttttcttgcttcgcctgcgccgttttacgtagtgcgacgtaacacgccccgctgccgccatgatgcggtagcgcggtgcaatatgcctgaacatcatcaaattcggtcagccagcgcgccacatagctgcggacaatattggcatgcgatttatcatcccgccctttaccatgaataatcagcacgttacgcaaaccatccgccagggcttgttgaataaaactgaacaccattttgcggcactcttccaccggctggcgcaaaagattcaggctcgcctgttgcggatatttaccactgcgcagcttatccagcaccccatgttgcaacccttcccgccgaaactccagcggctgacttagtgggatgatgtcgagaaatccggtggtgaggaaattatcaagctgcagcgtgtcgatacgctgcggcgcacgttggttacgcgttggatgccagtggacatcggtagcacgtttcagcggctggacatcttccatggcgtcaagaaacagcgatttgtcgtcaaggttcatgttacatcctcccgcaattaagagcgcgatatgataaccagaccgggtcggtccaacaacgtattacccaaatttccagtaataagttccaaatattgccgatattttaagcaaaatacttatgcatgattattcattcacgatattaataatgtaacttatattttcgtgaaatctgtcactgaagaaaattggcaactaaaggttaaaaccgttataacacagtcaccggcgcagaggagacaatgccggatttaagacgcggatgcactgctgtgtgtactgtagagtctggcggatgtcgacagactctatttttttatgcagttttaactttgcagatagccgcattctcgccggaattgcgtgattaatgacgcggtcagtggtgtctggcgactatcacgccgctgaatcaaataataggccgctttcggtaaaatttcgctaaccggcaacatcaccagcccctgtccgtgcaagggatcgcagcccatttcttcaggcagtatgctgagaaaatcgctttttgccaccagactgatacaggctgagaacgtctcgcagactacaccgacctgtggcgtttgcgcctgatcgtcaagcaattcactcaactgtttgtagtagctgccgtgtggcgtcggcattgtccagctgtaatccagtaactgtttgatcgaacgggcaccaatggcggggtgtcccgggcggcaaaagatcgcgaattgcttttccagtaatttctcaaaagtaaattcgtggtcgtacggtccctgataataggtattgatggtgaaatccaattctccctgacgcaattcattaatcatcgacaccagttgcccttccataatgcgtacttttacctgcggatgctgctgatgaaaacgagatatgacagctggcatcagactgcgggaaatactggcccccatgccgatattaatctgccctgccagttgcccttgtcgttggcgaatatcctcttgggctgcgcgcagctcttcaagaattagactggcgtgctgataaaaactttcaccggcatcagttaacgtcacgcctttactacggcgaaaaaagagttgcgccgctaacccttcttctagctcctgaatagatttactcagtgccggttgcgacatattcaacattcggctcgctccgcgaatgctgccctgacgagccacttcaacaaaagcccgaatttgatgaatttttacctgaaaagccatgacgccaccgataaccgttatttatcagaccaaagaaactggcatctactttaatgcagatgattgtgtcagggtaatttatgaacggttaaaactgtgaaaaatcagttagtgataagtaaaaactatcgctacgtgaaccgggtcacactttttactgatgacgggaaaggttatggagtctttgaatcaatttgttaattcgcttgccccaaaattatcgcactggcgacgtgattttcatcactatgcagagtctggctgggtggaattccgcactgccacccttgttgcggaagaattgcaccagctcggctattcactggcgctgggtcgcgaagtagttaatgaaagtagccggatgggattacctgatgaattcactctacaacgcgaattcgagcgcgctcgtcaacagggtgcgctagcacaatggattgcggcttttgaaggtggtttcactggtatcgtcgccaccctggataccggtcgccccggtccggtgatggctttccgtgtcgatatggacgcgctggatctcagtgaagagcaggatgtcagccatcgcccctaccgcgacggttttgcgtcatgtaacgccggaatgatgcatgcctgtggtcatgatggacataccgccattgggcttgggctggcgcatacccttaaacagttcgagtccggactacatggcgtcatcaaactgatttttcagcctgcagaggaaggtacgcgtggcgcgcgggcgatggtcgatgcaggtgtcgtagatgatgttgattattttactgccgtgcacattggcactggcgtacctgcgggcaccgtggtgtgcggcagtgataattttatggcaaccaccaaatttgacgcgcacttcaccggtaccgccgctcacgcaggcgcaaaaccagaagacggtcacaatgccttgttggcggcagcacaagccactcttgcactgcatgcaatcgccccgcacagcgaaggagcttccagagtaaacgtgggcgttatgcaggcaggaagcggtcgtaacgttgttcctgcctcggcgttgctgaaagtggaaacacgcggggccagcgacgtcattaatcaatatgtttttgaccgtgcacaacaagcgattcagggcgcagcaaccatgtatggtgtcggcgttgaaactcgtctgatgggtgcagctaccgccagttctccttcgccgcaatgggtcgcatggttgcaaagtcaggcggctcaggtcgcgggggtcaatcaggccattgaacgtgttgaagcgcctgcgggttccgaagatgccacattaatgatggcccgcgtgcagcaacatcaagggcaagcctcctacgtggtgtttggcacacagctggcggcaggtcatcacaacgaaaaattcgattttgacgagcaggttctcgctattgccgtcgaaacgctggcgcgcaccgcgctcaattttccctggacgcgaggtatctgatgcaggaaatctatcgttttatcgacgatgcgattgaagccgatcgccaacgttataccgatattgccgatcaaatctgggatcatccagaaacacgttttgaagagttctggtcagcggagcatctggcttcggcgctggaatctgcaggcttcaccgttacccgcaacgtaggcaatatcccaaatgcctttattgcttcgtttggtcaaggcaaaccggttatcgccctgctgggagaatatgacgccctggcaggtttaagtcagcaagcaggttgcgcgcaacctacatccgtgacgcccggtgaaaatggtcacggttgcggacacaatttgctgggaaccgccgcctttgccgctgcaatagccgtcaagaaatggctggaacaatatgggcaaggcggcacggtgcgcttttatggttgtcctggcgaagaaggcggctcgggtaaaacgttcatggttcgcgagggggtatttgatgatgtggatgcggcactcacctggcacccggaagcctttgccggtatgttcaatacccgcacgctggcaaacattcaggcatcatggcgctttaaagggatcgcagcacatgccgcgaattcccctcatttgggacgcagcgcccttgatgccgtaacgttgatgaccactggcaccaacttcctcaacgaacatattattgaaaaagcgcgcgtacactatgccatcacaaatagcggcgggatctcgcccaacgtggtccaggcgcaggcagaagtgctttatcttatccgcgcccccgaaatgaccgacgtgcagcatatttatgatcgggtcgccaaaatcgccgaaggtgcggcattgatgaccgaaaccacggttgaatgccgcttcgacaaagcctgttccagttatctcccgaatcgcaccttagaaaatgccatgtaccaggccctatcccattttggtaccccggaatggaactccgaagaactggcttttgcgaaacaaattcaggctacgctcacctccaacgatcggcaaaacagtctgaataatatcgccgcaaccggtggcgaaaacggcaaggtttttgcactacgtcatcgtgaaacggtactggcgaatgaagtcgctccatatgccgccaccgataacgtgcttgcggcatcgactgatgtcggcgacgtcagttggaaactgcctgttgcccagtgtttcagcccctgttttgccgtcggtacaccgctacatacgtggcaactggttagccaggggcgaacatctattgctcataaaggaatgctgctggcggcgaaaactatggcagcaaccacagtcaatctcttccttgattcagggctattgcaagaatgccaacaagagcatcagcaagtaacggacacgcaaccgtatcactgccctatcccgaaaaacgtgacaccgtcacctttaaaataacaacaacaacgcaaacacagcaaccgaggaatgcccatgagtatgtcatccataccgtcgtcctcccaatccgggaagctctatggctgggtcgaaagaattggtaacaaggttccccatccttttctgctctttatctatttgattatcgtactcatggtgacgacggcaattttgtcggcctttggcgtcagtgcgaaaaacccgaccgatggtacgccggtcgtggtgaaaaacctgctcagtgtggaaggattacactggtttttacccaatgttattaaaaactttagcggttttgctccacttggtgcgatcctggcgctggttttaggtgccggtctggcggagcgcgtcggcttactgccagcactaatggttaaaatggcatcgcatgttaatgcccgctacgccagttatatggtgctgtttattgcttttttcagccacatttcttccgatgcggcgttagtgatcatgccaccgatgggtgcgctgatttttctggcggtgggcaggcatccagttgcaggtttactggctgccattgcaggcgtaggttgcggctttacggctaatttactgattgtcacaaccgacgtgttgctgtcggggatcagcacggaagcggcagctgcgttcaatccgcaaatgcacgtcagtgtaattgataactggtattttatggccagctccgtagtcgtactgacgattgttggcggcctgataaccgacaaaatcatcgagccacggttaggtcaatggcagggaaacagcgatgagaaactgcagacattgaccgaaagtcagcgttttggtttacgcatagcaggtgtcgtatcgctactttttattgctgcgattgcgctgatggtgatcccgcaaaacgggatattgcgcgatccgattaatcacaccgtgatgccatcaccctttattaaaggtatcgtgccactgatcattctttttttctttgttgtctcgctggcttatggcatcgctacccgcacaattcgacgtcaggcggatttaccgcatttaatgattgaaccgatgaaagagatggcgggatttatcgtgatggtttttcccctcgcccaatttgtcgccatgtttaactggagcaacatggggaaattcatcgccgtggggctgaccgatatactggaaagttcagggcttagcggcatcccggcgtttgtcggtctggcgttgctttcctctttcttatgcatgtttattgccagcggttccgcaatctggtcgattcttgcccccattttcgtaccaatgtttatgctacttggctttcacccggcatttgcgcaaatcctctttcgtattgccgactcatccgtattgcctttagcgccggtatctccttttgttccactgtttcttggattcctgcaacgctacaaaccagacgcgaaactgggtacttactattcgttagtcttgccctatccacttatctttttggtggtatggctgctgatgttgctggcgtggtatcttgtcggtctgccgataggtccgggtatttacccacgtttgtcttaagagagaacggatgctgagattacttgaagaaaaaattgccacgccactgggtccactgtgggtgatttgcgatgagcaatttcgcctgcgggcggttgaatgggaagagtacagcgaacgcatggtgcagctgctggacatccattatcgcaaagaaggctatgagcgcatttctgccaccaatccaggcggtttaagcgacaagcttcgtgaatattttgccggtaatcttagcattattgatacgcttcccactgctacgggggggacgccatttcagcgcgaagtctggaaaacactacgcactatcccctgcgggcaggtaatgcattacggccaactggctgagcaattgggccgtcctggcgcggcgcgtgccgttggtgcggcaaacggatcgaatcccatcagcatcgtcgtaccttgccatcgggttattggccgaaacggcaccatgaccggatatgcaggcggagttcagcgaaaagagtggttattgcgccatgaaggttatcttttgctgtaaacattaaacaatttgtgccagcttgttcacacttttatgtaaagttacccttaacaacttaagggttttcaaatagatagacatatatttacatctaatatcggaattctctgctgttaaggtttgcttagacttacttgctccctaaaaagatgttaaaattgacaaatatcaattacggcttgagcagacctatgatcccggaaaagcgaattatacggcgcattcagtctggcggttgtgctatccattgccaggattgcagcatcagccagctttgcatcccgttcacactcaacgaacatgagcttgatcagcttgataatatcattgagcggaagaagcctattcagaaaggccagacgctgtttaaggctggtgatgaacttaaatcgctttatgccatccgctccggtacgattaaaagttataccatcactgagcaaggcgacgagcaaatcactggtttccatttagcaggcgacctggtgggatttgacgccatcggcagcggccatcacccgagcttcgcgcaggcgctggaaacctcgatggtatgtgaaatcccgttcgaaacgctggacgatttgtccggtaaaatgccgaatctgcgtcagcagatgatgcgtctgatgagcggtgaaatcaaaggcgatcaggacatgatcctgctgttgtcgaagaaaaatgccgaggaacgtctggctgcattcatctacaacctgtcccgtcgttttgcccaacgcggcttctcccctcgtgaattccgcctgacgatgactcgtggcgatatcggtaactatctgggcctgacggtagaaaccatcagccgtctgctgggtcgcttccagaaaagcggcatgctggcagtcaaaggtaaatacatcaccatcgaaaataacgatgcgctggcccagcttgctggtcatacgcgtaacgttgcctgatttttccgcataactcactatccttctgtcatatcattaaatttttctgatttattgatctggcagaaggttcatcactgtttcattcaccagatatgggttaatcttttaattacaaactgcgttgacagttgttgtaaggagaccctgtatggctatgtatcagaacatgctcgttgttatcgatcctaaccaggacgaccaaccagcattgcggcgagctgtttatttacatcaacggattggtggcaaaattaaagcctttttgccgatctatgacttctcatacgaaatgaccaccctgctctccccggacgaacgtaccgctatgcgtcagggcgtcatcagccagcgtacagcctggatccacgagcaggcaaaatattatctcaatgctggcgttcccattgaaattaaagtggtctggcataaccgtcctttcgaagccatcattcaggaagtgatcagcggcggacacgatttggtgctaaaaatggcgcaccaacatgaccgtctggaagcggtgatttttacgccaacggactggcatctgttacgcaaatgcccaagcccggtgtggatggtgaaagaccagccgtggccggaaggaggcaaggcgctggtggcggtgaatctcgccagtgaagagccgtatcataatgcgctcaatgaaaaactggtcaaagagacgatcgaactggcagaacaagtcaaccataccgaagttcatctggttggcgcttatccggtaacgccaattaatatcgcgattgaactgccggaatttgacccgagcgtttataacgatgccattcgtgggcaacatttgctggcaatgaaagccctgcggcagaaattcggcattaatgaaaacatgacgcacgtagaaaaaggtctgccagaagaggtgattcctgatttggcggagcacttacaggcggggattgtggttctgggcacggtaggacgcaccggtatttcagcagcattcctcggcaacacggcggaacaggtgattgatcatcttcgctgcgacctgctggtcattaaacctgaccagtatcagacacccgttgaactggatgacgaagaagacgattaacgactcttcaataactgacaaggcccgagttatcgggcctattttttacttactgctcttcgccgccaaggaaataaattcccaacgggattgccagcaacacagtaaagaccaggctataaacaaaaatcatcgatgactgaatcacatacattgatgtcgtccactcagacagcggaatattgtactgttctataacgccgccgatggtcgcgcgagtcacaaccgacgccgcaataatgaaaaccgccaacaaaccaaagagaaatttcttccctttcgctgacttcagtttcgccataatcatgatgtaatccttgtgcagacaaatttcttgttacctaaacgtaacaataccatgacatttcaccgttgtctgctctgaaaacctcacctcttagctggatttacaatcaacgcattgattagttagctaatgttgctacttccttccctgactattgatgatctgaatgaattgtcgcggtaaaatagccccgccaggggtttccggcatgacgacaattatctggaggagcctgataaaacaatgatcgctgaactgtttacaaataatgcgcttaatctggtcattattttcggtagctgcgcagcattgattctgatgagcttttggtttcgccgtggaaatcgtaaaagaaaaggatttttattccatgcggtgcaatttttaatctacaccataattatcagtgctgttggtagcattattaattatgttatagaaaactataaactcaaatttatcaccccaggcgttatcgattttatctgtacgtccctgattgcggttattctgacgattaagctatttctgctgattaatcagtttgaaaaacagcagattaaaaaaggtcgcgatatcaccagtgcgcggattatgtcgcgtatcatcaaaatcaccattattgtggtgcttgttctgctttatggcgaacatttcggcatgagcctttctggcttgctgacctttggtggtattggtggtctggctgtcggtatggccggtaaagatattctgagtaacttcttttccgggattatgctctatttcgaccgtcctttcagtattggcgactggatccgttcaccggacagaaatatcgaaggtacagtagcggaaattggctggcgaattaccaaaattacgacctttgataatcgtccattgtacgtaccgaactcgctgttttcgtcgatcagcgtagaaaacccaggacgaatgaccaaccgccgcattaccacgaccattggtttacgttatgaggatgcggcaaaagtgggcgttattgtcgaagctgtacgtgagatgctgaaaaatcacccggccatcgaccagcgacaaaccttactggtttatttcaaccagtttgctgactcttcattgaatattatggtttattgctttaccaaaaccacggtatgggctgaatggcttgctgcacagcaagacgtttatttgaagattatcgatattgtacagtcacacggcgcggactttgccttccccagccagacgctgtatatggataacattacaccgccggaacagggtcgctaaatcagacatcactggcgttatgcacaagggtaacgccagttcccatcacatcaatgcttcacaatatacatagtccgactgtacgccacatcttcaggattattaatgggataacctttcagccacggcttgattaatcgtccattggtatattgataaattggtgcaatcggtgcttgctccatgaggattttttctgccgcgttgtaatcggcattacgcgctttaacggtattttccgtcgatgcctgggccagaactttgtcatatgccggattgttaaagcgtgaaatatttcctgaatgcgttgacgttaataatgtcaggaaagtggagggttcattataatcccccacccacgaggcgcggataacatcaaaattgccggtgttacggctatcgatataggttttccattcctgattttgcaatttaacatctacgccaaggttctttttccacatcgatgctacagcaatcgcaattttttgatggttttctgaagtgttatacaaaagcgtcagcttcagcggtttttgcggaccataaccagctgcgctcaacaaagtttttgcctgcgcattcagttcttcctgactcatttgttcaaacggcgaaggttccggcgtaaatcccgcggtaacatctggtgtaaaatgccacgctggcttttcgcccgtccctaatactttttcggtcatcaggcggcgatctatcgtcatacttaatgccagacgaacgcgctgatctgccgtcggccctttttgcgtgttaaacgcataataataggtcccgagctgcggcggcgtataaacctgccccggaatatccttcaacagcttctgatacatatttttcgggaaggattcggtgatatcaatatcccccgcgaggtaacgcttagtggctgcggattcctgattaattggcaggaaggtcactttttgcagtaccgttttggcgttatcccaataatgggtattcggtaccacgaccagtttttcattgactacgcgctctttaagaacataagcgccattgccgatcagatttccgggtttcgtccactctttaccgctttctacgttggctttttgcaccgggaagaaggcaaagttagcggttaaattcacaaaccacggcaacggtttatcaagctgaattttcaaagtatgggcatcaactgcggtgacgccaagctggtcaggcgtagctttaccatcaataatcgcctgtgcgttgttgattcccgccagcgcggcaaaccatgcaaatggcgacaatgtttttgggtccaccagacgttgccagctgtagacaaaatcttgcgccgttaccggtgtgccatccgcccattttgcgttatcgcgcagggtaaaagtccagatacggttgtcattacttttccactgagtcgcaacgccggggacaatctcccctttttcgttctgattcaccagaccttcaaacagatcgcgaatgacctgaatctctggcaggcccacggctttagcgggatccagcgacgcaggctcatctttaatgtggcgcaccagctcctgcttctctgccagtactgtgccgctcggaacttctgcagcatacgaaagagaaatgctgctgaccaacagcgcacaacacgtgactgaaacagagtgcttcataagtttccctctaaccgacattaaaattgatgcgtaattatttgtttcgccttaaagaaatgcaaacaacttccatcaaaaaagtgacaaaggaagcatcaaatgttttaagtatcaatatatcaaatcagatttagtgtaaataatagtctccaaaatgcggtaaagcacatagaactccgaacactacgttcgggcttcgcacgttcaaacccgttttcggtatcataatcagcatctgtcgccattgtacgaagaataaaaaatgaccaaaacgttgaaaggaactgagaatacgttaagagaagaattaaattaatgtatcagcaagtagtgctaaacagcacctttatacttcagcctatctataaataatgagaatgccgagccagcatgtcgacggtgtggatagtacaggtgataaccgggtaaatctggtgtgaatttatccaaaacacgtatcagttttttttctttaatagcccgctcaacctgatcataaggtagatacgccaatccatgcccatcaattgcagcatcaatgatcaggtctatcgtattcagtaaaagctgaccttccatgcgaacacgaacttcacgtccaccgcgtattaatctccagcgatttgctgtacccgatgtgggaagatacaaattaattgcctgatgatctattaattgtgacactgacgttggaacacttcggcgagaaaaataatccggtgagccaacaatagccattggtatatctggcccgattcgaatggcgatcatatctttatccatctccccacccagacggacgcctgcatcaaaacgttcagaaacgacatcggtcaaaccataatcaatggtgagctgaatatcaatttcaggatgcgatttcaggaatgtgcgcattgctggtaacaatatcgtttttgctgcatgttctacagtagtaatacgtattgtcccggatgggcggttctgcagatcgctcagggatgccatggctgaatctatgtcatgcaacatagggccaagaacagacaaaagatgctcgcccgcttcagttggaacaacgctgcgcgtggttcgcgtcagaagccgcaatcccaatcgttcttctatacgacgcactatctggcttaaagctgactgcgccatgctcaggcgggctgctgcacgagtgaagctacgctcctctgcaacgacgacaaacgccatcagatcagcgatttcttcacgcttcattcagtatctccatgcaatctattaatcatttaaatgataggtctaatcatgattttgggtctaatcaacttaatgatcaatatctatagtgatatcaccaaccgttaaaacgaaccgacaactccatgaggaacggaatgatgaataataaagtcagcttcactaacagcaataatccaaccatctctttgtctgcagtgatctatttccctccaaaatttgatgaaacccgtcagtatcaggcaattgtgttatctcacccaggtgggggcgttaaagaacaaacggccggaacctatgccaaaaaactggcggaaaagggatttgtcactattgcttatgacgcatcttatcaaggtgaaagtggcggcgagccgcgtcagttagaaaacccatacattcgtactgaagacatcagtgccgtgattgattacctgacaacgctttcttatgtcgacaatacccgaattggtgcgatgggaatttgtgccggtgcaggatatacagccaatgctgcaattcaggatcgccgcatcaaggccatcggtaccgttagtgcggtcaatattggttcgatattccgtaatggttgggaaaacaatgtgaaatctattgatgccctgccatacgttgaagcgggttcaaacgccagaaccagcgatattagcagcggagaatacgccattatgccactggcaccaatgaaggagtccgatgcgccgaacgaagaactgcgtcaggcctgggagtattaccacacccctcgcgcgcagtatccaacagcaccgggttacgctactttgcgcagccttaaccagattattacctatgatgcttaccatatggcggaagtgtacctgactcagccgacgcagattgtggcgggcagccaggcagggagcaaatggatgagtgacgacctgtacgatcgagcatcaagccaggataaacgctatcacattgttgaaggcgcaaaccatatggatctttatgacggcaaagcctatgtggctgaagcaatttcagtattagctccgttctttgaggaaactctgtaatgaaacatattcaaatccgcaatagtgatatggcctggcatattgctgccaataatctgggataattttcatgaaaaatgtactgattcttggtgctggcggtcagatagcccgccatgtgattaatcaactggcagataagcaaaccattaaacaaactttatttgcccgtcagccagcaaaaatccacaaaccctatccaactaataaaatgcaaacaacttccggcaaaaaagtgatacaagatcgatgacatagcgttgaagaaaaggatttgataatccgcaaaatttgcacaacactgcctgtaatacttcctgaaccagagacgatcatgaccgtaacccgcccacgcgccgaacgcggcgcatttccgcccggaacagaacattacggacgttcattattgggcgcgccgttaatctggtttcctgcccctgcagccagccgcgaaagtggtttgattctggctggcactcacggtgatgaaaactcttcggtcgtcacgctctcctgtgctctgcggacgttgacaccttctttgcgccgtcatcatgtggtgctgtgtgtgaatcctgacggctgccagttggggttacgggccaatgctaatggtgtggatttaaacagaaactttccggcggcgaactggaaggaaggtgaaaccgtttatcgctggaacagcgccgctgaagaacgcgatgtcgtattactgacaggtgacaaacctggctccgaacctgaaacccaggcgctgtgccagcttatacaccgcattcaacctgcctgggtggtctcattccacgatccactggcctgtattgaagatcccagacacagcgaattaggcgaatggctggctcaggcgtttgaattgcctctggtaaccagcgtcggttatgaaacgcctggctctttcggcagttggtgtgcagatctgaacttgcattgcatcaccgcagagtttccgcccatctcctccgacgaagccagcgaaaaatatctctttgcgatggcaaacttgctgcgctggcatcctaaagatgcaattcgcccgtcgtgaactgaagcgccggttccacatctaccgccagccaggtcggtccgtcaagatcggcgaaactgacctgcggcaccagcggtaaagcggcgctaatggcacgagaggtacacaacatgcagcccagcatcagactgaaaccttgtgcacgcgcttcagtcgccagcgccagcgcttccgtcagacccccggttttatcgagcttaatattaaccatctcatagcgccctttcagcgccttcaaattgctacgagtatgacaactttcatcagcacaaatcggcaacggatgaataaaattctccagcgccgcatcgtcctgcgcaggaagcggttgttcaagcatcgcaacgcctaaatccgccaatagctggcaacgcgccgccaacccttctgcacgccaggattcatttgcatcaacgatcagcgtcgcatcgggcacagctgtgcgaattgccaccatccgctcactgataagatggttatccagcttcactttcagtaatttcgcgcctgcctgccagagtgttgatgcactattggccatctgatcaggcgtaccgatgacaaccgtctgtgcagtgataactgtctcgggaagcgttatgccgatcaaatcagccagcgattgctgctgtcttcgcgcggccagatcccacaatgcacaatccagcgcattacgtgctgcgccggcagggagaattttttgcaactcctcccgtgtcagccctttctctagttgcggcacgacgctcataatttgcgccattaccgaggcatcactttccccataacgcggatacggcgtgcattcgccggtgcctttaataccctcttcttccagttcaaccaccaccacgcgcgcttcactgcgacttccccgggcaatcacaaacggggtatgtaagggccaggcttcctcgaataccttaacggttctcatctttactccttgttgtcgcggtggtctgcggattaagcgcaaatagcgtttgctgtgttattgacagttagcataaactaggtgtgacgttaactatatgtaaacaggaaagataatcatgtcacaaaccgttcatttccagggcaacccggttacagtcgccaattccatcccgcaggcgggtagcaaagcgcagacttttactctcgtggcaaaagatctgtctgacgtcaccctcggtcagtttgcgggtaaacgcaaagtgctgaacattttcccgagtattgataccggtgtttgcgccgcatcagtacgtaagtttaaccaactggcaactgagatcgacaacaccgttgtgctgtgtatctctgccgatctgccgttcgcccagtctcgtttctgcggcgcagaaggtctgaacaacgttatcaccctctccactttccgtaacgctgaatttctgcaagcttacggtgtggcaattgctgatggcccactgaaaggtctggcagcgcgtgccgttgtggttattgacgaaaatgacaatgtgattttcagccagctggtggatgaaatcaccaccgagccggattacgaagcagctctggctgtactgaaagcataatttaatatgcctgatggtgttgcaccatcaggcatattcgcgcttactcttcgttcttcttctgactcagaccatattcccgcaacttattggcaatcgcggtatgtgaaacgccgagacgttttgccagtttgcgcgtgctgggataattgcgataaagctgggttaataccgagcgttcaaaacggctggtgatttcgtccagcgaaccttccatcgcatcttcgcccacggctaccgttgcggcgtcataatccggcaacaaaatatcctgtggacgcagctcataaccgtccagttgtgtcagtgcgcgatagatagcgttctttaactgccgcacatttcccggccacgcataacgcgtaagtacagtattcaggtcagcggccagtttcggacgcggcacgccctgctcgtcggcaaagcgggcgacgaacagctcagttaacggcatgatgtcctgcggacagtcacgtagcggcggcagattgagcgtcaacacgttcagacgataatagagatcttcacggaacatgcctttttgcaccagttcgaccagattcttctgcgtagcgcaaatcacccgcacatcgacatgcacctcatggtcttcgccaacccgacggaaagtgccatcattaaggaaacgcagtaatttcgcctgcatccgtggtgacatttcccctatttcatccaacagcaccgaaccaccgttcgcctgctcaaagaatcctttcttcccttccggagcatgaccaaacagttcactctcgaccgcatcttccggtatagacgcacagttcagcgccaggtaaggtttgcccgctctggggcttgcctgatggcaggcgtaggcaaagagatctttacctgtacctgtgtcacccgtaatcagcagcggcgcgcttagcatcgccagtttctgcgcctgttcgacaacatgcttcattttcgggctgacggcgacaatttgactgaaggcgctgacgtcctgggcggcgacattttgcaactggcggcccatacgaatcgttgatcgcaacatcaccaccgcaccggtcaggacgtgttgatcattttcatcctgaagataaacaggcgtaatctccatcaggaaattctgcccattaataacgacatgctcgttatgcgaatcttgcggttcgctttccagccaacgtaaaaaattaaagccgttaatcaattgtgcggcggtatggttgcgcaggcgatccaatttttgcccaaaaagctgacagctcgccgggttcgccatatccactttgcttttcatatcgacagagagcacaggttcaggcaacgcctccagtaacgcgctcaacgccagatgctcacgttcggaaggcatccacgggacagtacgcacatcggtaacacccgcaatacggcgtatttcggccatcagactgctgaaactctcaaactccagttcagcaaaattgaggtagattcgcccaatgggatcaatctcaataccgcgtaaatcaatgcctcttagcacgagtagatcgagtaattcgcgggtcagaccgagtcggtcttcacaaaagacttccagacgcatgggaaccttcacctgaaaaaagaacaattaatatgatgatatgacactatttggatagcaggaaggtttctgtcaacaatcattgacacaaagacggaaaaacgggcacttcggcgtaaagatatccggtcagcacccgatattgcattatttttcgctgggcgttttgcctttttgcagcgtttctttcacctgaccgataagctgacgacggaaatccccgaggcgaggtttgtcatcgtcaatccacggcagcgggcggcaaagctccatagctttaatcccgagtcgtgccgtcagaagtcctgcaccaatcccctgagctgcgcgggtagacaaacgagcagcgagatcttgcgacatccagtccatccccacttcgcgcaccagttcgctggctccggcaaaagcgatattcagcaataccagcttaaacagacgcaaacggctgtaataccccagttcaatgccatacagcgtggcgatgcgattaattaaacgcagattgcgccaggcgataaacgccatatcgaccaacgccagcgggctgaccgcaatcatcaacgttgattccgccgccgaacggctgatttcgcgccgcgcctgggcatctaaaactggctggaccaaatgcgcatacaggctgaccacttcacggtcgttttgcgtttcatggattgaggcataccagcgttgcagcgccggatgcgactgatcaatacccgcctgctgcgccagtttttcgcaaaatgcgcggcctttgcccgtgccgtggctatgcaataaatcacgcgcttcgtcgcgttcatgggcgcgctgtcgcaagcgccataagcgccgccactctgttaccacagaacctacgccagcgccgataatcaatgccccagcggcacatccacccagcgccacccagtcctgggtttgccaggcattcattgtccactgtacaccctgcccgacaacgcttgcgccaaacagagccagccctcccatcaccattttgcgccacaggctgcgtttcggacgtaacgctgcgtccattaccgcttcgacttgcccctcttcttcctgcgcttcgtcgagcgtggccggggcaaaattttgcgcctgattttcgtcaaaggtctgctgcgccctgaatttaggattctgatcgacctccagaggaccgtcgaaatcaatacgtggttttaacggttcggtcatcgcaatttatctcctattaaaaattccagcgcagcatcaagacgaatatgcggtagtggtttgtcgacatccatcacctgcggacgaaatgcctcaaactggaagccttgcttatcccagaacgcctgaccaggcaaacgtgcgggaacttcgccaggataaacagtgagcggtgcgccatcgctaagtcgattaccacgcagcgccgggattttctcaccgttaacatcaataatgccgctggtggtcgcctgaactgacgccagccccaggcagtccatgctgatcccttcgaacgccgcattttgccaggcatcctgaatcagttgttgcagtaatgaaaccatattagcgtgctgatcgatggtcacatggtccgctttagtggcagcaaacaatagcttatcgataaccggcgaaaacaaacgccggaacagggtacgctgcccgtagtgaaaactttgcatcagctgcgtcagtgccagacgcatatcattaaatgcctgtggcccactgttgagaggttgcaggcaatccaccagcacaatctggcggtcaaagcgcagaaaatgattcttatagaaccccttcaccaccttctcgcagtaataattaaagcgctcgcgcagcattccggcattggtatgcttatcggcctgcgccagtttggactcgccccaggtatcgacatccggccacgggaagaattgcagcgcgggcgcacctgccatatctcccggcaagacaaagcgcccaggctgaataaagtgcagcccctgctctttacagtggtggagataatcggtccacgcggcggcaatgtccgccagccggttttcgtcggcaggcgctagcgggtccagcccttcgctcatcattcgccatttcgccgaccattctccgcgctgaccattgagtaagcccgtcatctggcgcgaccagcttaaatagtcctgcgccagcatcggcaggtcgagcaaccattcgccgggataatccacaatttccagatacagcgtggaggtatccttaaagtggcgtagcagcgaatcattcgatttaaaacgtagcgccaggcggatttcactgacgccgcgcgttggcgttggccaggcgggtggatcgccatataactgcgccagcccttcgtcataggtgaagcgcggaatgccaaagtcacgctggggaatgcgtttcacgcccagcaggcgctcttcacgcaccgcacttaacagcggcaaacgtgctccggcgtgaatattaagcaactgattaaccatcgcggtgataaacgctgttttgccgctgcggctaagtccggttacagcgaggcgcagatgtctgtcgacaccccgattcaccagcgcattgagttcatttttaagtcgcttcattgctgtcctgtgctgctctgaagaccagaaaaaaaatcattcgtaaggatatgaatgtgggggccaggccattgattatcaactgcccgtgttgtcatcgaccggcgaactccataagatgtgcagcattcacgttcggacggagttcctgacctatgtcccctactatttatgatattgccagggttgcaggcgtatcaaaatccaccgtatcacgcgtgctgaataagcaaactaatatctccccggaagcgcgcgaaaaagtgttacgggccattgaagaattacagtatcagccaaacaagctggcccgcgcgctgacctcttcgggttttgatgccattatggtgatttctacccgttcgaccaaaactacggcgggtaatccgtttttctctgaagttttgcatgccatcaccgccaaagctgaagaagaaggtttcgacgtgatattacaaacgtcgcacaatccggcagaagatctgcaaaaatgcgaaagcaaaattaagcagaaaatgattaaaggcattattatgctcagttcgccagcggatgagtcattttttgcccaactcgataaatatgatattccggtggtggtgattggcaaagttgaaggtcaatatgcccatgtttattctgtcgataccgataattttggcgacagcattgcgttgaccgatgcattaattgaaagtgggcatcaaaatattgcctgcctgcatgctccgcttgatgtccatgtttcggttgatcgcgttaatggttataagcagagcctggctgcgcataatattgcagtgcgtgatgaatggattgttgatggcggttatacccatgaaactgcattaaaagcagcacggcaattattaagccagtcaccgttgcctgaggcggtgtttgccactgacagcctgaaattaatgagcatttatcgtgcggcagcagagaaaaatattgctattccgcagcagttagcggtggtgggttatagcaatgaaactctgtcatttattttaacgcctgcaccgggcggcatcgatgttccgacgcaggagttaggtcaacaaagctgcgagttattattccgcttaatttctggaaaaccgtcaccacagaatattaccgttgccacgcatatgacgctgaaataaataccagctaccttgcctgaatgccagatgcgatgctagcgcatcttatccggcctacatttatagatcggataaagtactcgcgccgcatccggcaatttagcccattatcagaacgagtaatttacgccgacacctgcataatggaatttatcactgtcgccttcgtcgtgatcctgccactcaaacgcgtattccagcgaaacggaaagtccgttctggaaatcataaccgtaaaataaacctacacggttaaaatcatggccttcacgttcaatatcatcctgccagtcccagttactccagcgatccagcccaatgcgcgtatacggcgtcaccgagtggttgccgagcgtcagcggcaaataggcgcgaatttcttgcgtggaaaactcaccgttattgcggctgtcgtccatattgaagccgcgctcgagataatagttcactcgcaaggcaaccgtttcgttgaaggtatattgcagacctgtttccgtttcgacacgggtatcagcgtaaccggtagtgttcagatcgttggcaaatttatacatcgacaaccaaccgttgaaacgtaaatcgtcagtcagtttcacatcccagtctggcgcgattttccagcgctgcatattcgccgtgtctttacccggttcatcaacgtagtgataaccataattacggaaaccgccggtcaggccgaaactgaaatcatcgttttcgaggaactgataatgcacctccagctccgggcgatcaaaccacgttccacgtttacccgcgctataatctaccggcccttcctgataataggccagagcaattctccacggcccgttggcggcattaaaatagactgaaggctccgccagcccatccatatcttcgccataaccctcgacgttttctatttcgtacatcgcgccgatattaaagtgccagtcgttcctttcctcggcctgtgcgcaggccattcccgcacacatcaccagtgcggtacagggtaataactttttcattattgttccttgtattatcctgggggaatgccttccccctgtatttagcgaattgctatttccgtttctgcatcaaagaaatgacatttcgtcatatcaaaatgaatagtgatattttctcctgcatgataatcatttaacgcaccagcacggaccactaactcgtgccccccaaccgtggtgtagagcataaattccgcaccggttaattctgccacgctaattttggcggaaatgttattttcctcttgcgcgtccggatgaatatcttccggtcgtattcccatcacgatgggcttatgcaaactttcctgtgttttcagaaccgctaatttctcttcgggaatggttaatttaagcgtttccgtaacgaatttatcgccatcgatcgtgccgcgaataaaattcatcgctggtgatccaataaatccggaaacaaacatattcgcgggttggttataaacggttttcggcgcacctacttgctgaacaatcccgtctttcataatcacaatccgcgtcgccatggtcatcgcttcggtctgatcgtgggtcacgtagatcatggtggtgttcagtttctgatgcagcttgctgatctctgcgcgcatttgcacgcgcagcttggcatcaaggttagagagcggttcatccattaaaaacacgcccgcttcgcgtacaatcgcccgcccaagcgccactcgctgacgttgcccgccggaaagcgcccccggcttacgtttcaggtactcacgcaggccgagaatttgcgccgcccagttcacccgctcatcaatcacctctttggcgattttttgcatcttcagaccaaacgccatgttgtcgtaaaccgtcatatgcggatacaacgcgtagttctggaacaccatcgctatattgcgtgctttggctggaacgtcattcattcgtttgccgtcgatcaacagatcgccgccgctgatctcctcaagcccggcaatcatgcgcagggtggtcgacttaccgcagcccgacgggccgacaaacacgatgaactctttatcggcaatttccaggttgaagtccttcaccacatgcacctggttatcgtagattttttgaatatgttgtaacgaaagctgagccatgttgattcctttgctatacgttttgccagaaggccgataaccgcggccaggtgagtgattccgttgaaggcaacagtaattgcgccccggttaagcccgcgccgatccccaccgagcgcataccgctggcgttaatggcgtcaatgcccgcctgcgcatcttcaatgccgatacatgcctgcggcggcacgcccagccctgcacaggcggcgagaaagatttccgggtccggtttcgagtttttaagttgggaagcatccgcgcagaaggtgaaaaactcgcgcagctccagcgccgctaaaatcgtcggcgcattcagggagacagaagccagcccaaccgagatctgctgtgcacggagatctgccagcaaagagcgaatgccgggtagaacagcgttgaccgtcaactcgcgtagtgagtggacatagagcagatttttgcgatacgccagttgcgccctctcctgcgagttaaagtcgccctctttgcccccgtgttgcagaatgcgccgcagagactcatcgcggctgatcccttttagggattcgttaaactgcgcatcaatgctgatgccaatttcagcggcaatctgctgccacgcctggaaatgcagatgcgcggtatcggtgattacaccatccagatcgaaaattaccccttgcagtttcattcatcctcctgatgtttggtagcggtcccattgaagggcaaaataaaatcacccaaacagaaaacagattcttcagccacggttataagctgaccgttcaaacgcagtgaaacgggcgcagaagttcgaatcgcaatacgctgcgcgtcaagagtgacctgtaattcgcagccctgccagaacagagggaaagacaactgttgccactgctcaggtaacgccggattgagatgcaattcaccgtcacgcacgctcaccccggcaaaaccctgaatcgcccccagccagatagcgccagttgcggcagcatggataccatcatcacaactatgcggatcagcaccaagatcgatttcagtcccctcgcgccagaactgataactttgggtcagcaggccacagcgtgcggcaacaatgccgtggattgctttacttaatgacgagtcgtgaatagtgcgcggttcataaaattgcagattggcaagacacgatgccgctgagaactgctccggcagcatgtaattgagcatcaccacatcagcttgtttgaggatctgcatctcgttcacttctgcgcgtgaataatccagcagtatggtttgcttccccgccgccgctttgtatttcgccagattaatcgccggcttagccataaacgaatcatcctgcggcaaaacgccgtcgggctgaatttctggcatccatagctctttgaggaacatttcggcgcgatggataaacgcatcgtcgctacagccgaactggcgggcaatattcagcgcctgttgaacgttgtagcgggccatatagctggtgtatgcattattattgacatgttcggtatattcgtctggcccaataacatcatgaatttccagacgatcgttaactctcaccgcgcggctaatccagaactttgccgtctccagaagtagcgccatgccttcatgcgcaatgaaactttcatcccccgtggtctgccagtattgaataaccgcccaggcgatatcggccaccagatgatgttccgcctgcgccgaggccactttttgccgcagcccggtgcgaatgttaatggcggcaaattccggcgtctcttcttcgccgctgcgcgcgctttcccacggaaatagcgcgccctgccagccgttgcgtcgcgctttctcctgcgcgcctggcaagttgtgccagcgataacgcagtaaacttcgggcaaccgtcggatcgctaaacagatgaaacggtaacaaaaatacttctgtatcccagaaaacgtggcctttgtagccttcgccggttaagccttttgccgcaatgctgctgcgctcgtcgtgggcaggcgtcatgatgcgcagatgataaagcgcataatctaacgcttgctgatcgtgcgcttcgccgccatttaccgtgatacgacgtttctgccaccattgacgccagttttctgttgatgctgcaagaagttggtcgtaactctgctgcgcgcacatttcaagctggcgaagcgacgcgctgccccactcgtctaaagcagcttgcctgtcatcccgccagtcgatccacaccagtttttgcaacgtcattgtctcgcctgcatgaagctgcgcactggtatgttgcagtaaacggcgctctttggcggtatagcattgctgcacatcaccgctcaccttacagcaacagctgatggccacatcactgcgtccatcctgggtggtgtagctcccctgcatcagatgctgaccaaacacccgcacctgggtttcgtcgagatgttggcgaccgtgattggtttgcgtggcgtcaatgcctgttgaaatcagcactgacgcgtcggcgtccagtggcgtaatagtgatttccagcgcaatgagcggcagttggtctgccgaaacaaagcgacggctggcgatggtgtaacctgagccgttgctggtacgccagacaacattgcggcgtaattcgccactggcaaagtcaagctcacgctgccaggcttcgtgggataacgagaaaacctcaccatttatggcaatctccatccccacgacatcaggcaggttcaccagttcgttgatttcaccttttcccgcccgatgatacagccccgccagatacatccctcgcgtctggcgcgtgtaatcttcttcatggctggcgcgaagcccaagatagccgttcccctgcgccatcagcgatgcatacttgttcagggtatgctggctgaaatggggttctgataacgttactggcctggtcataattccacacgcgtccctgtttctgcggattgatacaacgccgccaccagttgctggatgatgtacccctgctcggcgtcggctatcatcacgggcttgccctgtacgtgattgataaaggcttccatgctgcgcaaatggcggttgtcgtctgccatttcccgttgcatcagcgtcattaattcaccgttgttatcggtgtagatatgtgctggaaacagcgtcgcaccagctttatcaccacaaaagctgacgttcataatcgactgttcgcggatgttgagtgcaaatgacgtttccagccacagaatgccgccgttatgaaattcaatggtgccaaacagcgaatcttcgacgctgtaagttgccggatcccactcaccaaattgaccacagctcttttgcgtgccgatcttttgaaagctatgcgcattcacgcttttcaccgccggaaagcccagcacatacatcgcagcatccagcatatgaatgccgatgtcgatcagcgggccaccaccctgcagttctttattggtaaagacaccccagccgggaacgccgcagcgacgcagggcgcgggcggtggtaacgtaaatctctcccaaaacgccgttggtcacctgttcacgcagctgttgcgtatcgagcgcaaaacgatggtgaaagtcgtaggccagcaccttgcccagtttgcgcgcggtatcgcacatttcccgcgcctgttctggcgtcatggcgggcggtttttcgcacatcacatggcagcccgcttccagtgccatcagggtatgttcgtaatgaaaacggttaggtgagcagacgctaaccacatcaggtttcaccgccagcagcatggcctgcggatcgtcccacacggatgcattcccgtatttttctgccagcgcctgcgcctgggaaaggcggctgtcacagacagccaccagttccagatcgttgcgggtgcagtagtacgaagcatgaaccttatccgccacctggcctgcgcctattatcgcgacccgcagcggagagcttgtcattgcacttttcacaaagacctcttagcaggtacgcaaccaggccaacgaatcacggtacgcctgggcaggatcttccgcccggatacgcccttcgtacactacatagccctgatagttatccgcgcgcagctgttcaaacagcgcgtggaaatccagggtgccgctgcccggctggtagcgatggttatccgcaatatgcacatgaccgagcaggtcgcggttgtcatgcagcgcctgcgccaggttatcttcttcgatattcatgtgatagaaatcgccgataatctgtacatgtttaagatcgttttcgacgatgtaacggcgggcatcggcgagggtgttgatcatatgatcctgatagcggtttaacggttcgagatacaccacggttccggtacgcgcggcgacctgttccagtacgcgcagggaatcactcaccattttgcggtcgccgtccaggctacgcggcgaggtcatcggcggtaagcggaaggtaaacatgccccacgcagccggaacgacgatgcctttaccgcccacttctgccagcgcttcgagaatgcgctcgatctgctttaagccattaagacgacgctcttcgataaagtcgccaatccatccgtcatagccaccgcaggcggtggtcaccggtaaaccggtttctttgatcgccgctttgacttcttcgatgttgttaaccagcagtttgccgtcaatctcaaaaccatcgaagcccatctctttgatataacgaaatttctccagaatgttttccggaaagaacgcctgattctgtgtgccgattttcatttttttcattcctttgaattaaaacgtaacgcccattttgatgctctgttccggatgctggtcgacatactgcatatagctttccgggctattggcaaaggtcaccaccgggtcgattaaatcttcgcaattgagataaccgttcatcagcagttcccaacaggtttcttcaatacgcttgcggctccagcgcggataatccgggttcggttcgctgcacgcgcgagagaagacaattttggcgttattgaaatgcgcttcgcgtccgaggttaaaaccttcggcaaacggcttggcaaacgcgacataggagatggtgccgccataagccagaccgcggagcgccgattgcagcgcgtcggcgtagccgctggtttcgataatcacatcggcaccctgcttgccggtcagcgttttgatctctttacctacatcagtgccgatggggttaaggcagaaatccgcgccgtggcgacgggcaatatcacagcgatgggcgataggatcgacgccaatcaccacagaagcgccagcgcgtttagccagttggatggcaatttgaccgattgcgccaagccctaccaccaccacaaaatcccctacgcgcacgttggcatcgcgcacgccgctcatggcaaactgcgccgggtcgtagcagacggcgtttttccaggagctgccttgcggcattttgcgcagcttgtagttattcactgcgttaatgatgaccgtctcggagagcgggccgtagccgcatacgctgtcgcccaccgcgtagtcggtaacgtcgctgccgcactcgataatgtcgccaaccaccatgttgccaagctggaatttgccaaactcaatgccgcgcggcgcatctgccggacgcggagtgaacatctgccattcgccgttaaagtcttcatcaataaacgggctggcggcgcggaagtcgaccacttccgttccgtgtttcggtgcgccgaaacgcacgcggatcttcacttcattagctaaaatcgcccgatcttcatactcaaccagcgcagcaacacgcggtgctgtggctactaactttttcatttaaaactccttgtaaagaaactggccgctttagcccttcacgccaccggcggtcaaaccactcttaataaaacgttccgaaagcgcatacataatcaccaccggcaatgcggtcaccagtgaggccgccatcatccgtccccagatgtaatctggcgtactgaacagcgcgttcaggcccaccggtaaggtgaaattgctggcgctggagaggaaaatcgacgcaaacagatagtcgttccacgccaccataaagcagtagacgaacacggatatcagcccggacatcgccaacggcacggtgatgcggaagataatttgcagacggttgaggccatccatcatcgccgcttcttcgatctcatcggggatggtgtcgaagtagcttttcagcataaacacggcggtgggcagagtttgcgtcaccatggtgatgatcagcgccatctcagtgtcgtaaatgccaagcgcggtgatgattttgaaaagcggcaccaccagcaaaatgccagagaacatatacaccgtgtaaaagctggcgttgatggtcatccgacctttaaagcgcaggcgggaaagcgcgtaagccccaagaatgccgaggaataccgccaccacggatgaaaccacagacaccaccagactgttacggaagtagtcgacaaacgggaaaatcatcgggttaaaaatgtcgacgtaatgctccagcgtccactgctgcggcagcagcgtaggatgcagtgagatcgcctctttcgcgcccttgaacgaggtcatcagcatcacaaaaaatggaaacagcgtgatgatgagaaacagcgccagcccgcagtaaaaaccgatgcgactgagtgtgcgtttatttgttgccattgaggttcacccgtttcctggtcagcagaatgacagcgaaaataatgatgaagagcaccaccgagatcgccgccgcttttcctaaatcattaaaggcaaaggcggttttgtagagatatacaccgagaatatcgaccttggtcgtcagcaaataaacatccgcgaacatgtagaacatccagatggtgcgcagtgtcaccaccgtcgccaggaccggcataattgcgggcagcgtgacgatacgaaaccgttgccaggcattagcgccatccatctctgccgcttcgtacagcgatttgtcgatggtctgcaaaatcgccagaaacgagataaaggcatacgggaagtagcgccagatggcgaacagcaccaccagcacaaagctactgcccggattatcgaaccacagcggtgcctgctcatagagatgcagaagatcgacgccgaggtagttaacaatgccgtagccgttgttgaacatgtatttccaggcgaacaccagcgaaatggacggcgttacgtaggagaggatcaccagcgaacgcgcggttttgcgcaggcggaactcgcggttgaaaaacatcgccaccgccagcccgagcacggtgctgcccgccaccaccagcgcggtataccagaccgtcatccacagcgaatgccagaagccgggatcggagaggatacgcacatagttgctcaccccaacaaacgttgactcgatgttgggattgagcggcagacgtaaaaaactgatttcgatattcgacaccatcggccacgccaccagaccgcccagcagtaataagctgggcgcgagaagcagcagcgcaaagggcatatcggaacgacctgaaaaaagcctgttcattgcggattcctgtcctgggtttagtgctgttcgatcagttcatccagttttttctggctcgcttgcagcgtagtagagagatcggctttacccacggtgacgttatgcaccattgaactcaccacgccagaacccgtcacatcacccatgcgggtaaagtttttatcccctactgcgccaaaaacctgaatatttggcagttcaccgattagctgattcggtagttcacccagcgccttaataacgtcgttgtctttccaggtggcggtagtcaccaccgctttattcaccggcagcgcagcacctggcgacatcatcacccagtcggcaatgttgtctgcctgctccataaaggtgacaaatttttctgctgcttccgtctcttcggtcttttgcccggcggtaatggtcagcgaggtcaacatgccgtagaccgcagagtttttctcggttggcaccacgaaaccgacgtttttcgggtcgccttctttaatcacagccggaaggatataggtggagtaaatcgccatcggcgcggtgccgttcataaaggcgtctttcacttccatgatgtcgttagaacccggcatagtgttggcagcaaggtcgcggtaataggtcagtgcctgcatcatctctggtgtatcaagggtgattttgccttcggcgttaaagacgttagcctggttggataacgcaaactgggagaaggattgttccgtcaacacgctttctgctgtaggcagcgcaatgccgtattttttattcgccgggtcattcagtttctgtgcaacgtccagcagctgttgccagtttttcggctcctcaagccccgcttttgccagcacatctttgcgataccagataccgccaatccaggcgctgacaggaacaccggtccatgcgctaccatcttcggtacgcacaatacgcagtacgccatcgtaaaacgcgccttcaccaacgttgctgatgactgtggcaaccgctttgcgatcgataagctgctctttgtccatcactttggcgtagtcatggctggtttcgatcacttccggcagcgaaccgctacgtgaaagagtaatgactttagtgttataggcatcttcttccacgggcacttgcttaacggtgatgccagggttttctttttcaaaacgggcaatcaatttactgataacggcctggcgctcctgctccaccgaagaatgcataaattcgatggatacattcgttttattttcttctttacagcctgaaatcagggcgcatgaaaccagtgctgataacagcacgatttttgatttaatcatgagatgttcctttttatttaatccacataacctgccaggggcgcagcgttatttcattacccaatatatcaacttcactaatcagatcccgaccatgcagattagtaatatttacatgctgaatatttttactgacattaaacaatccagtcagacaattaccatcagcgttacttctttgaatacgcattacggatgaattaatcgtatcaatggtaaaattattatccggatgaaactcgttatggctgcgacgaagtgtaattaaacgcgacaactcatgatataccgcatgccttaatgtagcttcatcgttcagttctcgggttatctctttactgtgatattttttacggttaatcgcacggttatatccgagtttttcgacacctgcgtaatcattacgcgagccaagaatactttgaatatatatcgctggcacaccggggaaacttaacaaaatcgcatgggcaaggataaacctggcgcaacgttcttcatcgctactctcacggcggcttaacgcatccatataggtcacatttatttcatacggactgcgtgtaccgtcgggattatttttccagtttactaatgcaccttcctgctgtaacgcctcgaccagctctaatatttcgctttcaggcaacaagccccgtagcgggtttagcccgatgccatcgtgagaggcgaggaagttaaaccaggtggtgttgctggaaggtagtgtcaggttttgcgcccacgcacaaagcgcctcaacgttctgtttttgcaccgcatgcagcaccagtggcggcagcgagaactggtacaccatatgtgcttcgtcatcgcctgcgccaaagtaagcaatgttgtctttatgcggaacattggtctcggtaatgatcactgtacctggcgcaacgttatcaataatcgaccgtaacagtttgataatcagatgtgttttttccagatggatgcagcttgttcccggctctttccacataaagccaacggcatccaggcggacatactcagcacctttcgcaaggtaacagagtaaaacatccaccatcgccagcaacacttcagggctacggtaattcaggtcaatttgatcgtcactaaaggtggtccataaatggcgcgttgaatgatcgcgcatctggaatggcgttaataacggtaacgcacgcgggcgagtgacggcgctgagatcggtttgcgggtcaacggcaataaaaaaatcttcaaaacctggatgctgttgtaaatagtttttaaaccattcactttttgccgacatatggttgcagacaaaatcaaacattaaatgactgcattcaccgagttgctgaatatcctgccactcccccgcttcactggcgacctgatgataatcaattaccgaaaagcggtaatgactccaacttattgatagtgttttatgttcagataatgcccgatgactatcagacctatatgcctcgtgtttaactgtccaactttttggggtcagtacaaaccgaggccaacgaatgaacctagcaattcagatcttagcctcttacccgccatccggcaaggagaaaggctatgaagcacaaccctctggtggtgtgtctgctcattatctgcattacgattctgacattcacactcctgacccgacaaacgctctacgaactgcggttccgggacggtgataaggaggttgctgcgctcatggcctgcacgtccaggtaagggcaagcgcggggattttccccgcgcatttgactagcagattcattttctcatggcaccccttttacacttcagttagtgcatgtttttttcgatgcactaatagaaccatcattacagacaaatttgccgcctgccgtacagtgtgagatcccccctttcgaaccagaacagggtttgcgcccggcatcggcataaaaggaaacaagcgttcccataaacaaaataagtgccagttttttcatataacctccatggtttatcgaatcttatgttcgatttgaacgttatacgctggtttattttgataccgttgatgagatcaaagatcgggtgaattgattaaaaataagccagatggacgtatgggcaaggattatggttttatttatcatacaaataaatataataggcgcttccgatgtagacccgtattcttcgcctgtaccacgggtcggttttagtacaggcgttttctttaaatatccttcaggaacgtttacgcggcatcatgcgtagaagtgtgttgtccttccagaaatagtggtgtgccagtgcagccgcagcgtgcaacccgatgacaaaatatcccagattcgccagcgtttcatgccacgactttaagctatctacccgttcgaaattggcctctgaagcgtaaggcatcgtcaaaccaaacgcaaaccacgggttgccccggttatacatcatcaccaaaccaatcactggcagcgcaataaacaggagataaatcaccaaatgtcccaaatgcgccagtcccgtcatcatcggttttggcttaggtataatcggcggggttgggtatttcagccttaacaaaagacgaacgaccatcagcacgagaattgagatgccacaggaaacatgaatcatgttgatgagtggccgatcgctacgtgggaagaaaccacgaaactccattgcgcaatacgctgcgataaccagtaaaaagaccagccagtgaatgctgatttgtaaccttgaatatttattttccataacatttcctgctttaacataattttccgttaacataacgggcttttctcaaaatttcattaaatattgttcacccgttttcagtacgttacgtttcactgtgagaatggagattgcccatcccgccatcctggtctaagcctggaaaggatcaattttcatccgaacgttcctgacaggagaaaaccatgagtaaagttggtattaacggttttggtcgtatcggtcgactggtgttgggtcgattacttgaagtcaaaagcaacatagacgttgtcgctattaatgatctcacttccccataaattctcgcctacctgctgaaacatgattcaaactacggaccattcccctggagcgttgattttacggaagattcacttatcgttgatgggaaaagtatcgcggtttacgccgaaaaagaggctaaaaatattccgtggaaagcgaaaggtgcagaaatcattgtcgaatgtactggcttttatacctccgccgagaaatcgcaggcgcatcttgatgctggtgcgaagaaggtgttgatttccgcccctgccggtgaaatgaaaactatcgtttataacgtcaatgacgacactctggatggcaacgacaccattgtttccgtggcgtcatgcaccactaactgtcttgcgccgatggccaaagccttgcatgacagtttcgggatagaagtcggcacgatgacgaccattcatgcctatactggcacccagtcactggtggatggcccgcgtggtaaagatttacgtgcttcacgcgcagcggcagaaaatatcattccccacactacgggggcggcaaaagccattggtctggtgatcccggaactgagcggcaaactgaaaggtcatgcgcaacgcgtgccggtgaaaacaggttcggtcactgaactggtatcgattctcggaaaaaagtgactgccgaagaggtgaataacgcacttaaacaagcaaccaccaataacgagtcatttggttataccgatgaagaaatagtctcttccgatatcattggcagccatttcggttcggtgtttgatgccacgcaaacggaaattaccgccgtgggcgatttacaactggtgaaaacggtcgcctggtacgataacgaatatggcttcgtcacacagcttattcgcaccctcgaaaaattcgctaaactctgacgcgcacaggcggaggaaaaaacctccgcctctttcactcattaagactgtaaataaaccacctgggtctgcagatattcatgcaagccatgtttaccatctgcgccgccaataccggatttacgccatccggcgtggaagccttgcatagcttcgaagttttcacggttgatgtaagtttcaccaaacttcagccctttaatggctttcatcgcgacgttcagattttgggtatagattgatgaggtcaggccgtaatcactgtcattagccattgagatagcatcttccagcgtgtcaaatgcgacaactggcagcaccgggccaaaggtttcctcatgcataatcgacatttcctggcgaacatccagcagcaatgtcggcggataataatatcctttcccctctaccgctttgccaccgaacgccactctcgccccttcttctactgcgcgcgccactttttgctcgaccctttccagcgccgcggcgttaatcaacggccccatcgcaatgtcgttgcgttcagcggggttaccaaattgaaccgcctgcatcgcttcacccagccgattgacgaactgatcataaatgcctttctgtacataaacacgttctgcacagttacacacttgcccactattaatggcgcgtgaatcaacgatggctttgactgccagttcaagatcggcatcgtccattacgatagctggtgctttaccccccaattccagacacactttggtgatgtttttcgccgcagtcgccatgatcttctcacctgcagagacgctgcctgtcatactgaccattgcgacctttgggttacccgccagttcttgcccaacggtttcaccacgccccagtacaaggttaaacacgccgcgcggaaggcctatttcatcgacgattttggcgaatgcaatcgcattgtttggcgtaaattcactaggtttaatgacgatggtattaccggtcaaaagagcgggagccattttgcgggcaatgaggaagaacgggaagttccacggcagaatgccggtagtcacaccaagcgcacgtttaaacaaaagaatattttctcctggacgatcgctttgaataatctcgccctcgtaacgccgtgcccactccgccatgtaatcgatatagtcggcagtaaaagccacttcgacttcagccagctgctggatcttgcccccttcttcaacaatcagcgcactgatttcactggcgcgttcgcggatcccggcggagattttgcgcaaccaactggcgcgttcaatagcaggcaacgcttcccattctggttgtgcacgttctgctgcatcgattgccttacgggcatcctcggcctgaccatcgggtatgcgggaaatgacagcctctgtagcagggtttaccacatcaatccatgcgtctccacgccaggtaacaaactgtccatcgatatacataggatgttgaacgggtactgacatgggcgactcctgtgatttatatgtttgttttcggtgaatacattgttaattaacatcaatcatcagagagacggcatcgtgaaaggacaattctgtgaagggcttcataaaaacaagtgtaaaaggaataaaaggcagaaataaaagtcaggagtcatgcccgtttgcaaacaagtggttcacaaacgggcaatttttaacgtaacgagcgactttccatcgcctcgatgagcaccgcatcatgtttcagcgtttgccatgcatggatgacttctgccggaaaatcaacgtgaacgataaaatctcgcccgcggggaccgtagccatcgctatcatcgcgtaaacgcggcagctcgccagtgagtagtgagagataacgctcaactggccataatccttgtaactgattaataaagattacactgtctgcgttatttcctaactgaggaacgaatccgggataacttaaccagcgtggtgcatcgggattgtccccagtcatacggcggaacgtcgccatcgtgcgccgctgcatggtggggtcctgaacaacgatagccgtatgaactcgttctacggcctgattcaatagcgcgatgctaaagcgtgcgttttcaccgcagtttgttgactggtcttcaatccagattttttcatgcggaatgtgccagaactgatgagcgatatccgccaggatggtcgcttctgctctgccagtggtgcggatagtgttgtagtgcggatgctgtgcgatggcgctatacaaaaaagttgtcgagtgaccgataccaccactaatcagtaaaggaatttgctgatcgcgggcaatcttacatgccgcatcgatagtcggcataaccgcattgcctgcaaggatcacgcaatcggcctgatacggcacctcaccggagaaatcatcctgcgccagccactgtccgataacatttatggcatctatagttgccggcgaaagcgtcggaaacggggtaatgttcatggttcctccttatcgttcccttaagaatactgcgtgagataatagtgagaagcggagcactctgaaaggaggaaatcgtatgtccttaaccgccactccgcaagcctgacatatcttttaaggaaatgctgtagataaacattattcatcttgcagcagagaattgtatttttctgaattcctgaatttttacccttaccgttttagaattaataaaaaacccggcgctaaatgcttaccgggttttttctttatcaggcaaatagcagggttaaccgctaatctgctccatcgcctgcaaaatacgcttatctgaaatcggataaggcgtaccaagttgttgagcgaagtaactaacgcgcaactcttctatcatccaacggatctctttcacgtcttcatcctcacgacgtgcgggcggcagtttgttgatccattgctgccacgcctgctggacgttttcgactttcagcatctgcgcacggtcgcgatgtggatcaaccgccagtttttccagccgtttttcaatcgcctgcaaatatcgcagcgtgtcgcccagccgtttgaagccgttaccagtgacaaaaccgcgatataccaacccgcccatctgcgctttaatgtcagaaagccccagcgccatggtcatatccacccgccctttcagacgtttgttgatattgaacactgccgtaaggatttgctcgacctgcttcgcaatatccaccaccgtgtcgttcagttcggcacgcactttttcatgcagcgcagcaaagccttcttccgtccagaccgggccaccattggcgtcgatcaatttatccacaccgcaggagatacagtcgtcgatcagctccagcactttgccatacgggttaaagtacagtcccagcttggctttgttcggtaacttttcatgtaaatatttgattggcgatggaatattcagcagcagtagacggcgaagaccgttccacattgcctgcttttgctccagcgggttatcaaacagtttgatcgccacactgtcgcgctcatccaccagcgccggccacgccttcactttgtagttgccacgcttctgttcgtagctttccggcagctgaccaaaactccagatatgtaagccgctctgctcgataccgtcatccgccaccgcagatagcgtttcctgcactttgcctttcagcgcatctttcagatcttgtagcgagcgcccttcttttagcttcttgtttttgtcatccaccacgcggaaggtaattttcaggtgatcgggcacctgatcccagtgccagtcttcgcggtcaacggtaacgccggtcatccgccgtaactcgcgctcaaggctgtcgagcaacggtaactccagcggtttgacgcggcctaaaaacgcttcggcatagtttggcgcgggtacaaaattacggcgtaccggtttcggcaacgatttaatcagagcaatcaccagttcgcggcgcagaccggggatctgccattcaaacccgctttcctcaacctggttaagtaacggcagcggaatatgtacggtcacaccgtcagcatccgcgccgggctcaaactgatagctcaaacgcagcttgagattgccctgatgccagaagttcgggtaatccagcttgctgattttttctgcgccctctttgatcaacatgcttttttcaaagttgagcaaatcaggcgtttcgcggctgacttttttccaccagctgtcgaagtggcgagcggagattacatcgtggctgatgcgctggtcgtagaactcaaacaacgtttcgtcatcaaccagaatatcgcggcgacgtgatttgtgttccagctcttctacttccgcccgtagtttcaggttttcacggaagaatgcgtgacgcgtctgccagtcaccttccaccagcgcgtggcgaataaagagttcacgacataacgccggatcgatctggctgtagttgaccttgcgcgcggcaacaatcggcaaaccataaacagtgactttttccgttgccatcaccgcgccctgcgcccgttcccagtgcggttcgctgtaggtgcgtttaatcaaatgctgagcaactggctccacccattccgggtcgatacgcgcagcaatgcgcccccacaggcggctggtttctaccagttccgccaccattacccatttaggcggttttttgaataaaccagaaccggggaagatggagaaacgcgcgttacgtgcgccggtatattcttgtttatcggcatctttcatgccgatatgggaaagtaaaccggtcagcaacgcaatgtgaatttcgcgatactccgccggttcgctgttaaccggaatgccaagttctttcaccacctgacgcaactgggtgtagatatcctgccattcgcgcacgcgcagatagttgagataatcggtacgacacaggcgacggaaggcgttggaagaaagcgccttttgctgctcgccaagataattccacagattcacaaacgcgagaaagtcagactctttgtcgtggaagcgacgatgtttttcgtccgatgcctgctgtttgtccatcggacgttcgcgcggatcctgaatggagagcgcggacgtgataatcatcgcctcacgcacgcagccatgtttttgcgcttccagcaccatacgcgccagacgtgggtcgacaggcaactgcgagagctggcgaccgagcggcgtcagtttataggcgctggcctgttcatcagtggtgatcgcgcccagctcttcgagcagacgcacgccatcctggatattgcgtttatccggtgcttcgacaaacgggaacgcagcgatatcgcccagccccagcgcggtcatctgcaaaataaccgaggccaggttggtacgcagaatctccggatcggtaaactccgggcgcgagaggaaatcgtcttcggaatagagacgaatacagatcccttcggacacacgaccacagcggcctttacgctgattggcagacgcctgggaaatcggctcaatcggcaaacgctgcactttggtgcgatagctgtagcggctgatacgcgctgtaccggggtcgataacgtatttaatccccggtacggtcagcgacgtttccgcgacgttggtcgccagcacaatgcgccgtccgctgtgcgactggaataccctattttgttcgctgttcgaaagccgcgcataaagcggcaagatttcggtatggcgtaagttcagcttgttcagcgcatcggcggtatcgcggatttcccgctcgccgctcataaagatcagaatgtcgccatggctttcctgactcagttcgtctacggcgtcaaaaatcgcctgcaactgatcgcgctcggtgtcatcggcttcttcaacaatcgggcgatagcgcacttccaccggataggtccgaccggagacttcaataatcggcgcattattaaagtggcgcgaaaagcgttccgggtcgatagtcgcggaagtgataatgatttttaggtcaggacgccgcggcagcaactctttcaaatagccgagcaaaaaatcgatattcaggctgcgttcgtgcgcttcgtcaataatgatagtgtcgtactgcatcagcaggcggtcttgctgaatctccgccagcaggataccgtcggtcatcagcttgaccatcgtgttatcacttacgtgatcgctgaaacgcactttgtaaccgatgcaaccgcccggctccgttttcagctcttccgcaatacggttcgccactgttcttgccgccagacgacgcggctgggtatggccgatcagtcctttaatcccgcgccccagctccatacagattttcggtaactgagtcgttttaccagaacccgtttccccggcgacgatcaccacctggtgatcacgaatcgcttcgagaatgtcctgttttttctgactaaccggtaaattgtcaggataagtaatttccggtcgtgccgcttcacgcagcaggactttccctgccgcctggtcaatctctttcgccatctcctggaaaatggcctgttgtgcatcaggatttttaaccttcttcacgccgtgcagacggcgagaaaaacgcagtctgtcacgcagcatcagcgaatccagccgctgctgcaaggccgtaaaggtcaatttttgttgttctgtcataacgttagtgggcagtagtctgcctgattaattttcttttaaatgatagatatagagtaccacatcgcggctttctatgcgttgttcaataaattcgaacataggcttcgatttattgcgctatctctgtggcaggattgtgaataaagtgtcaacaagcaacggggcatcgcccattcaaacatctataaggaaacaccatgagcaaggtattagttcttaaatccagcatcctggcagggtactctcagtctaatcagttgtccgattattttgttgaacaatggcgcgaaaagcactccgctgatgaaatcaccgttcgcgacctggctgcaaatccgattccggtactggatggcgaactggttggcgctctgcgtccgagcgatgcgccgctgactccgcgtcagcaggaagctctggcactttccgatgagttgattgccgagctgaaagcccacgacgttatcgttattgcggcaccgatgtataacttcaacatctcgactcagttgaaaaactattttgacctggttgcccgcgcaggcgttactttccgctataccgagaacggtccggaaggtctggtaacgggtaaaaaagccatcgttattaccagccgcggcgggatccacaaagatggaccaacggacctggtgacgccgtatctgtccacgttcctcggctttatcggcattaccgatgtgaaatttgtcttcgccgaagggatcgcatacggtccggaaatggcagcgaaagcacagtctgacgcaaaagcagccatcgacagcattgtttctgcataaccggacacggtcttgatgtggactgtagatattcagtccacatctcaatccacttacctgttttcccataatctcagcatcgctttgtgctcgtctgtcagcacaatctgcgggcgtctggctcgaatatagctaatcgcttcattaacggttttacagtgtccgtaacataacaaccatgccgccaccaccagcgcactgcgcgataatcccaatgcacaatggaccagaacgctgccttgctcttcgcgtaatgtttccagcatcgccacggcctgtcggagctccccctcttccggaaccaccagatccagcatcggtacacaaaaatagagtcgatcttttgtggctcgtccgcgagggaattcaaaggtgacgtccagaaccgcattctgtgccggaatatgtcgtggaaacgcccctaaataaacaccagcagtcattttgctcaccggctccaggcgacgacaaaaccaacgcatagacagccacatcccgatgcggcagggcaatgtcagccagtaaacggcgggcggtagtttcccctgactatctttccctgttgttatcgcgccaagcccaccgtacccacggccaattatgagtagcgataatactggccaacataaccagactgaccaccataactgaatcatcatcattagctccatcaatacaatgcacgagcccgcgcctacgacatagggcagtgctattttgattcgacgttgatcaggtttctgataattccaacgacggtcgacgggcaccatccagtcaatcaacatacctaccgccagccctgtgatgacatcaataaaatgatgctgccaggtcgtcagcgtcgaaatggcgatgagtaaaaaccatccgccgcagactttacgccacctctcagccagatgctgacgaaagtgacgccaaagtagccagcagagaataatatgcagcgaaggagactggttataaggcagatcaaacagttcaagttgcgaaaatagccatcccgtcaccccactcacttcaggacggataaaactaaacttcagcggatagagcaaaaaaccgcagcaggccattaccgttgccagaataagccggtggacaagtcggcgctgttcgaatgtcgtgctacaaacgaacagcgaaaatccatataaaagatccagactccagtaaggaacaatagtccagggaagaaaagggatcgccgtttcccaaccgaatacctgactggggatatcatggctgttaaggtcctgaaccgcggtgaactgattaagagatccataggtgaagaagaaaaacggggccagcaacaataaccagccagcgccttgtagcaatacgttccgacgttcagttatcacgacgcaccgccatcgaaaccgtaaaaataccccactcatcaatccgttgtgtgcatttatcaaatccggcatcacgcacgagtgaatccatctccccttgcgaacgcacgcgcattacccacggtttaccatctttatgactggttaacaccccggcaatcatctccagttgagggtgccacggctgcccggtgtagatgagaatgccgcccggttcgatggcattggcaagacctgcgagtgagttttttacctgctcattttcgggaaaaagctcatacaggccagagacaatcgccagcgtaggccgcggagttaacgcgctgagttcctccgggttaaacgcatcgccctgttcaaaacgcacccgcccagacattccccgttgagcaatcatctcttgcccctgtgcaacatttaactcgctgtaatcacgtaacaaaatatcgcttacggcaggctcgtttgccagcgcatccagtacatagcgcccatgccctgcggcaatgtcaaccacgcggacggctaaacctttggcgtggagatcggcaacggcttgtttaatcagtatttgtaaatgggttttgcgctggcgaataccgcgccagccaacactgttcaggtagattttgtcgactaaacgcccgaatgcgttactaccttgcggttgattttgatagacataatccagcgaactgcctgaatcaaagccggtgctcattccgagatgcaggcccgaagagtgcgtcccgaacaatttcatcgcctttcgcataaagcgatacgctaaatcaaccggcgataatggcacgggtccaccagaaagtagccgccatcgatccgctgatggtcctgtgcagtcttcatgctgataatcaaatttttgcgatttgttagcatataaacgactaataaagctttgcattttttcaaatgccagcgccctgttctcttcacccaacgtgtcgtgataaaagcctggcagcagatgcagctctttcagagggctacgtaatctctgataaaaatcaatctgcggttggcgatgcaccacatagtcatcgcctgatatcagaagttgcgtggggagcgtaatcgccgccgcatctctaataatacgttcagacgttttgtagagatcgagcaagatattaacggcaatcgcccgtgtgatcagcggatcattattgaaactcgccccccgttgccgatcgtgggtcaaatagcgtcctttcacataggaattaataaaaaacagaccacgcagacgatgccataacgccagcgcaggacgtgccagcggcacatacaatttaaccttaaaggccggagaagccagcaccagcccgcgaattgcaggtgcataatcatgaatccatgtggcaaccagcactgcgccgacgctttgcgcgatcactaccacctcttccagtccaacctggctgtcgctggcagcaaaacggacaaattcatcgacatcccgcactgaacgcgcaagagatgggctataaccacgcggccccgaactttttccatgccctcgggcatcccaggcataaaaagcagtatctggcatcgccagttcatcaacgagatgttgtagacgaccagaatgttcatgcccgcgatgaaataagacgatgacctttttcgccccgggctgtaaagcgggccagtgccgataaaacaacgctgtattatcactggtggtaaaaaaatgttccccagggatgcgtgaattttccattttctctattttccttcagtaacagcagtagcgtataaaataaaaaaataccggagcggtgaaaattaatgagtcaatcctgtcaaggagtccgccatgtcctggcaatagttttccgctatctttaacaccaatatctcgtttgatggctgacatcacgacatcgccgcaaaaaccactaataccaattaacaaacccgctaataatgcctgtaatgtatttagcggtgtcagtaacggtccgataatcagtgacgcaatcatgatggtgatgacgccgcccatcagaccttccaatgtttttcccgggctgactttagggaccacttttcttctgccgcaggattttccccataaatactgtgcaatatcgtttgactcggttaatgccaaaagaaataacaccagtaacgccccgccctggatatttgtggttggcaacattaataaccaggcggcatgactcaaggcgaaaacggtcattatccagccccaaaaaatggcgctcacggtatgcagaaaaccagaggggtcacccactaaaacttgcccggtggctaatatcagaaacccagccaaaggtataaataacagaaacagctcaaagcaattaaaaccgataagcaaatagttaagaggaataccccaatataaccaacgcggaaaatgtacagatataagcgtacaatattctttcaatgccagaaaacttatcagcgcaaaaaacgtcaacgtcatccagcgtggacctgaaatcaccattgaaaaacaaatgacgatgccccaccaggtacgaatacgtaatgtaacctcacccccttttctctccggtaaccgccatagcagaaaacggtttatcagcgttgctaaaattaacaacgcgaaaagtgttgccagagatttttccagcattatatttcagcgctcataagaagcacactccgacaacgattaatcgcagtccagagaagcagaattgaagcaatgctccataaaagattattccactgcatccactgtggataaatggcaacggccagaccccacagaccaaatattaacgcgcgatcgcttttgccaaatggaccggcataactgcgaacaccgttaatcgtctgcgcgagtaaaccgcaaaactcggtcaatatggtgcaaaataacatgagtatcacgagtgatgcgttactttccggtaaaaataaaaatggtaaatagagcgcaatatcggaaataacatcgccagtctcattcaaaatcgcccccagacgtgtttgctggttgcactcacgcgccaacatgccatccagcgcattgagcgccatacggataaaaagcacgatgggcaatagcaaaaagaggatgggttgtgccgccaacatcaacagcaatccggtaagaagagaaagcgccagtgcagcaagagtgatgtgattcgctgtaacgtggtgcttataaagccaaaacatcgtcggccttaacagcgactgaaagagcggttttatctggtagagcgtcattatcaatccttgataattcggtttgcgctatggtgcatcaattcccctgacggagatatcgcaacacgccgtttcattaaaaattcagaatatatcaaggtattggggactcactgtcaggaatgattatccccaattaatcagatagttaaaaaacattacgttgtggatcaatacaactcatcaagttttctcatcgcttgttcccgtattgcgcgcgtcttaccgttaagcgccagctggcggactaaatccagttcagggttaacaagctctaacgccagcaaaggatcacgtttcagcctcgcctttaatacatcaactggaaaacggggattattcatcgccacaatccaccactcgggatcaatttctgccgccagtactgcaggcggtgtgtggcggttgttaagtgcgccgaacttgaaaaatgtgagattgcttttcgccagtgtactccaccatatacgatccggttgttttgccagtacatccagttgtgctaacgcatcggggtctagtgcataataaacacgtaacgcttcgtcaacctgcgcacgggaactgttttcctgcctcagaaaaaactttgcccaaatatcattgcgtggcgtgttttgctgtaattccttgagaacaacagcgggtaaattatcccaactaattaatgcactctctaaaaagtcccagtcgtccgaacgtatcagggcggtggcatttaatagcatctggtcatcaacttcgccgtggctaatcagctcagacaaaatcatatcagcgctggtttcatatgcatctgaatctgctttcggattatttttccgatgcgataaagcacgttgccaaattttttgtttcatcgacgtgctcagatactgatttttcgccagattactccacccttcaggatcgttgaaacgtgtcaataaccgttgtaaagcagcgtcagagtgaattacctgcatatcccgacagcaaaagtaggccggggattttttctccatccttttaacaaaattaaactgtaagttatctggcaatgctaaaaataacacacgtattagatcatcgtcattctcgaatttttggtataaatagcctgcaactttgtcactctcttgtggcgtcatccgcaacaattgaccatggtgtttcatctctgccagcttgaacgctaagcttgtgacaacattgtttgatgaatcgttcgccaactgcattgcctgattgtaggtgagttgtcctccagcaccgacctgacgaatagaggaatcatcactgcggatatagccatcaataatggattcaggcaataaccacgcatctttataaagctcctgaatgatcatatcccaatctcttttcgccagagtcatgacgatatccagagggagattttcacgtagcgcaagattcaacggaccgacaccatcaggtagacgactcattcgcgtcattatttcgacagagagcggttcacggtcgagcaaccccagaacaacaggctggtaacccaattgctgatcggtcaactccagaatctcattgtcaggcatatatctcgccatactttcaatcgtttgttcatcattgctattaataagttgtttgcgtaggttagctgaaattcctttaagccttgggagagttcgcattacggcaagatcaaatgtcgcaatgtctcgtccttcaaatgcagcaactttgccttcatccagcatttgcaattcttgcactaactcaggagaaggcttagggcgaaacagcgcttcttttttcatctgattacagacattccctgccatgcgaatattgcttcgcttaaaaatttctttcagagcatcttcatcattaattagcccccaataatatgcatcaggatttattatcatcagcgcttttttgacattttcagtgtcatgtttgtcactcgcacggaccatgaattcactatttgtcgaagacgcaacaacaggtgcaattatgtcattgataaatatcccacgcgcattaatactccccttaatcgtagacggattatcgtaatatgagtcgataaataccagtccacttgcatttatcgaaccggtaattaacagtggtgaatccgcaactatattcgttgccgtcacgttaccgagaataacccatggattagaaagagagaaagtggaaatattacctttgactgtcaaattcccaagaacaatcaatttttgattactctctatattaccttctaccactaaatcgccacgatgcactttccagttcgatgcagataaaccgaaggggacaagattcacgctactgttgatagcttgttcaacttgttgtttatcttcagcggtagccgcagaaaaaaatgattcaatatcaactgcatttgcaacacatcgaagttccgcctgtactggtagactcagcataaacaggggcagtaaacgtatccagccgcaattcctggccttaaacatatgcactccatgccattaaaaaagaaaaaaagggaaatgcatctttcccttttgtatattcgttattctcgcgaaataccatccaacgtagacaacacttcctcagaaagatgcaatttttcagcagccatattctcccgtaaatgcgcaaccgaagacgtccctgggatcagcaaaatattcggtgaacgctgtaacagccacgccagcgccacctgcattggtgttgcacccaggctcgcagcaacatcggaaagtgtggacgattgcagcggtgtaaagcccccgagcgggaagaacggcacgtaggcaatgccatcgtgggccaaagcatcaatcattgcatcatcagcacggtgcgcgatgttgtattcgttttgcacacagacaatttcggcaatcttgcgcgcctctgcaacctgcgtcggtgtgacgttgctcaggccaatatgttttaccaggccttgttgttgcatctctgccagcacggtcaggctggcctcaatcgatccttccgctgggccatgaccatcccccatcataacgcgcaggttaaccacatccagcacgtccagcccgagattacgtagattatcgtgcaccgctttttgcagctctgccggagaaaatgcgggcaaccaggatgcgtcctctccacgccgcgcaccaattttagtgacaattgtcaggtcgtcagagtaaggataaagcgcttcgcggataatctgattggtgacgtgcggaccataaaagtcgctggtatcaatatgattgacgcccaatgccagcgcctcacgcagcacggttatagcgacgtggcgatctcgtggggggccaaaaactccaggacctgccagttgcatcgcgccataaccaagacggttaacggattttgtaccgagagtaaatgtattgctgctcatcgcaccctgccctgtaataaaacggattaagaaaaatcagtatagaaacgaaaagagataaataatgcgaaggtgtaaacaagattactggatgagttgctctattgtcctgaaagacacaaaacaaaacgcgtcacgtaccacatccggcaataaaaaaaccgcaacctgtatcagcgttgcggtttagggatcacatgctaaaaattagaacgttttcttgaagttcagcatcacgcctttatcgctgatgccatcctctttccagttgtacgcatccagattcagcgaactttctttgctgctgtacttcacgccgacgcttgtcaggctattgatgccgccgcccttctgaccgtcatcgacgttaaagtgctgactgcctgcgcctgccaggcttgccgtacgctggctcttcgcgtagctcaggttcggcccgccttccagcgtagcgctagcgctccagccgtctttacctgcgtagtccagtttcagcccgacgatgctgtccaccgccgtttcgctgccactgttcatattcaggttaaagtctccggcattgcgctcctgatagccaccttccagtgtgtgacgcagttttacacccgcatatggcgtaaccttcagtccttcgctcggttcgaaagtcttcgccccttcgctgcggaactccaggtactgctgtttcacgtcggtatcagccgttttgttcgtgttgccaaatgcaatcgagcggctgctgtcaaggttgtgaacgtcgtaacgcaaggcgttattccagttcatgccgttatcgaacgacatctgatgtttcaggccaaaaaactggctataaccgcctgtaacgccattatcacccgctttctgcgcaccatcaccatcgagacgagcgataccgtactccagactcatcgtctggctttcgctcaggtcgatagttttacgcaatgccagcatgtcgtattcggtattattacctaactcggcacgcggatcgcctttcgcgacaacgttgaacgccagaccgttacccactttcggcgcggcatctgccagcatactaaagcggttgcttaacacgcgcgcttcgcggaataccgtggtcgcctggctaccgctgacctgtttcagagcactgttcagttcagcagtcgtgccgacgttcaggctggtaaacagttcgttgttggtgtaacccgcatccagtgctttcgcgatgtcattcaccgaggcatctgttgccacatcggtgtaggcatttttgctcatggtgacgtcaacgttaccgctggcatcggtgctgcctttggcagtccataccacggacgttgaggtgatggcgtcagcgtcggtcaggttgctaccttccactacgttatcaaaactcacagtggtgtctgccgtaccagcggtaaagcccgtgttaatctccacgccgttcatgctggcattgttaaccttcagcttcccggcgctgccgttaacgttggtaccgacgacatagccgttgaggttgttcatgctgccaccagcctcatcacttcccgacgttacactaaccgtattgggcttcggcacatccggcaacgtatagtcgccataatgcacttcgctgctattaccgttgttaccgttcataccttcaacattgatgctgtcgccctgcttgatcagtccagaacccgtaaccccatcggcaatcaccaccgtgccgttgttaaccacatgacctactgtacccagtacgctaaatgcaaacgagtcattggcgaagatattgatggtgccgttgttttcgattaccgcatccgccgtggcgttggcatcgagttgcataccgatcatacccgtgtcagtagtgcctgcggtaccgaggttgatggtgccattgttaaccagctgcgcgttcttatcaccttccatagccacagcaccggtgccgctgatgttcatgatgccgtcattctgggcaataaagttgctgtgggtgactttcacggcactggcgctgtcgtgatcgaagttgatgaccccgttatcctggttccagaagaaggcattctgatcgccggcattattagcgctgactaccagtgacttcgcagaaacatcaatcgttccgtcattgataaaacgaccatttccgccccacatattaacggctccgttgtgggaagaattactgatgttcatgtgaccggtattataaagcgtaccggactggttgatgtgcacagcattcttgtcgttatcaagaataaactcgccgcggttattgaaagctgaattattattaacttccagcatcccggtgttgttaccctcactactacttccgaggttccaggttccttcgttatttgccactgcagtacctgtcagcgcagcacctctcataatcgccccgtcagtttgattattaaagaccccgccagccgacatcatccgccctgttacactgccactattattgaatacccccgcgttctgcacgattttattgatggttccggtgttgttcactaacgaactatcagcaccagcattcatggtaatttgcgcagtcatttctccggcattattgaggattccaccgctaacatcgacgttattcgtcatcaccccggcatttttaatgacggcacccttgtcaagttttactaagttattgatgatgccaccgctggtattttccagaagaccgcttgataccgtaatttgatcaccggaaagcgttccgctattaacaacattcccagccagcttatcagtcacagcagcagatttatttagcgttacagtttctccgcttcgtgtaatcgtatcgccaccggtatagatcagtgaggtgaaatcatctgtattattgtactcattccccgattggcacacgccgaaagtgcagattgtaccatagttaacaattgttcctgtgccatcgttataaaacgcctgaccagtaccaacattgatattgataacacccgtctggtcgttgatagcagtaccatgctcataaacagccatccctaccagagtatttgctgccagactatcgtcataattaccatttttttcgaggttaatcgtcccctggttaataactgtattgctggcgccataggccgccatacctgcgccggcgttataaatagttataacaccgcccaattggttaattgctgttgcatttttccctgcaccactataactatcagtaccaactcccacacctgtaccgaagtcaatggcgctgttgctagctatatctcgcattgcggtagtgtcatttgcatctacccacatagaatccagtgtaattttaccctgattttctgctgttgaatctgctatagcaagcatgccgacactaccacgaccatacaaatcaatgatgccgctgtcagtattgataattgtgctattcgattgagcgactaaccctgttatgctactgacatcgttattaaaaataaatgaattcgatgtgcccgttgaatacttgttaaatacgctatgttgttccgtcactttacctgtgatcgtacctgcattagtggcgctccctccgttagtagccagtaaaacaatgggagacggtgccggatctttaccattttgtaataacgagatcgtgccactatttatacctgttgtattttcaccagtaacaaaagcaaaacctaaattctgaatttcaacagtacctttattaacaattttcgcaccggaatcagcataagtaagttctggggttcttgtcccatgatgttcaaaactgtcaatatcctgcattgttagcgtagcgccactgccaatttccagcaaagctttatcctgtacccgaataaccccggcaaaccccagagggaattctccgctgattgtcgtatctccattcagatataccgacgactcaccactaacgacaataacgctggtataactatatcctgtgcgcaaggaagtaacctgcgacccatctgcaagcgcgtttttctctccaatcagttcaagtccaccattcatattaacggtattgccatcgccaatcacaaccagacctgacgttttctctgcgctgccatcaaataaattactctgacgagaagtaacctcactgtctgatacaacagttaactttccatccagcgtcacgttattatcactgccgtaaacgttgatacccacggatggatcgaagaaatattccgccgcattgtctgcggttttatccttatcaaccagaacgttaccagtgatattcactgtattcgcatcgccagaaacgtttatgcccgtcgctttctgcccgaccacttttagatcttttgccgccagcgtcacgctgttattgttgccattaagatctaccccggtcgagaaatcgccaacctgcatactgcctgccagcgaaaccttcccactgttggttgtgatgctgaaccctgtcgcttcattgctaacgttaacatcacccgtattggatactgttgccccctcaccgttgatgagcacgccaatcgatccagtatcggaaacaacaatatctcctttgttgttaaccgtgccgttgtcaccaatgttctcaacaccatgcgcaccgcctgtaacagtcaggctaccatccagatttacaatgccgatattgcccgcgattttggtacccgtggaatcttttccatcaacagtggtttttccactgttattcgcggtggcgtcgttaccgttgatctgagtgccggtgccgccattggtgatagtgctctcgccttcgttattgacgatggcctggtcgccgtcaatctggataccgatggactccggatcggtgacggtcatggtgcccttgttatccaccgttgcgctgtcgccggtgatatcaataccgtgaccgccgccgctgacatccagatcgccgtcctgaatcaccttcccgttattgccagcaatttccgtaccggtggaatccttgccgtcaacggtggttttgccgttgttgtttgccgtggcgtcatcaccgttaatctgcgtgccggtgccaccgttggtgatggcgctctcgccttcgttgttaacaaccgcctggtcgccgtcaacctggataccgatggactccggatcggtgacggtcatggtgcccttgttatccaccgttgcgctgtcgccggtgatatcaataccgtgaccgccgccgctgacatccagatcgccgtcctgaataacttttccgttattgccagcaatttccgtaccggtggaatccttgccgtcaacggtggttttgccgttgttgtttgccgtggcgtcatcaccattaatctgggtgccggtgccaccgttggtgatggtgctctcgccttcgttattgacgatggccttgtcaccgtcgatctggatacccatggactccggatcggtgacggtcatggtgcccttgttatccaccgtcgcgctgtcaccggtgatatcaataccgtgaccgccgccgctgacatccagatcgccgtcctgaatcactttcccgttattaccgttgatttccgtaccggtggaatctttaccgtcaacggtggttttgccattgttgtttactgtggcattatcacccgtaataacaagctcaccgttgtgattatattgccacttcgttgcgccatctgcgctcaccccttcaagggcaacagtgttattcgcttcatcaatctgccaaagattaatcgttgccttacgaccattgctatcttgcagagatatagtcccgtcagcattctcggtataagtaaaaactgaatcgcgaatagttaacgttttttctgttttatcgagaataacgtcattattaaacgaaaccggtttgggaggtgtaggcgtatcatccggatcgtccggtattatctcatctccgccaggagttgggggaactggagtgtcgtctgattcatcatcagggggtgtcggtgggagtggagaattgttgcgatgatgatgatcatcatcgtcgtttagttccactacggctaaggccgtgattaacgcagcagcgcctgtggaaagccatggcatcaggttttgttcgactaaaggagagcattcagagggtaagcgtttaagctcttccggactgagttttcctgggtctgccggacaagtcacattggtatttttcttttcacctgtggtggtttctacctctgtgatatctgccgcccaaccctgaccactcagagctaatgcaatacaggccgacaatagagttttcctttgcataataaatccttctggcgaatataaagaaagccggatgcactaacccgaccaattagttatttaaaacatagaagacatccaatattgccagtagattattatctaatcaaacatactttcctataattcacaattataattcaggtgaataaaaaagaccatgaaatatataaattgtgtatataatataaattacaaattaaaaccacattctcattataaataattatatgatgaaaaaacggtatgaattaatactcaaataaataaagcagagcttaaacataactctgctttataattaaagggacaaaataattttacatctgttactgtttcggtcgcagattctcatcaaataccaggcgtttcctgccaggttcaatttcccgcaatggctcgacttgatgtaacgtctgcttacagcgtgtcaccagcacctggtactcatgcgtaccctgctttttccatgccaactcctgctcactgagttcacgaatcgctttcgccgggctgccgacaatcaggtaattagctggcatttctgctttggctttcacaaatgcggatgcaccaacaatgctgttctcgccaatcaccgcaccgtccatcactaccgcgttcattcccactaatgcattgcggcggataatgcagccgtgaaggatagcgctatgaccaatatgtccatcttctcctacaacagtatcctgctcgggaaaaccgtgcataacgcaattatcctgaatgttcgcgccatctttcaccacgatacgaccaaaatcgccacgcaggctggcatttggcccaacgtaaacgcccttgccgagaataacatcgccgatcaataccgctgtcggatggacaaaactctcttctggcacaaccggagtcagaccgtctatctgataaattggcataacgcctcctgttcaatattcaagccgccaaaacgttgaaaatacaggcttcccggcgcaggcagttcaccgaccgaggtttcacctttttcactaacgaacgctaaagcagcaggcgctacgcgctgataaatgttgatacacagctgacgcgccgtatgccctgcccagtgtgccggaagcaactcctccggcaacaatgggtctttaaggacgacacggcgataaaaatggatcagtaaaagctgaatatgaaatgcccgctccggggttaactcgtctgccgcctcttttaaaagcggcaccagcgggcggaatgactgaataaaggtttcgtacatggcattttgttcagttaaatgccagcactcttctactctggcacgcagtgctgcgcgagaaagcgccagtggtatttgcgcttcaaaacaaatcacgttatccgccacacccgcttcatgcaaaagtgtctgtacatcggccagtttttgcgacggcgatgccatcaggctgggtgccagtgcgccaaaaccttgccagatcaactgctttttgacatcagccagcgttgatttatctaaaccttccgagagcaacaggagccatttaccatcccatgcaggttgctctgcgcgataaattttactttctgcccgtcgcgtcaggcgcaagcctttatcactgaggctatagaaactgcgtcgcccgatgcgggaaacatccagccagccttctttattaagacgaaacaaagcggtgcgcacgaaacgctcaccaaatcccagcccttccagcaaagcagccagactacccaaccagatttcaccaccacgatgggaaagcgaatcaccatacagagaggagatcaaagatgtgccactgaccggaacagcgtttacagcatgttggataaaagtatcaagtttactcattcgcttcagtctgttgttattgttgtgatttatgaatcatagcacaggtcgtatcgacttctggccctggcgctttaccccaccagggccagacgatacgtcaggcaccaacaatattgcgcagatcaaacacccgacacgccttgccttctgaacgcgggatactgccacagttaacgatcatcacatcggtagagatccccaccatcgacttaatccgatggcgcagctggtggcatacctggcaacgctgctcatgcgtcaatgtcaggctactttctttcaactccactttcacagaaagtgaatcaagatgcccccggcggttcacctccagttggtaatgcggcgataaatgttcgaatttgacaatctcttcttccagttgtgacggaaagacatttacaccgcgaataatcaacatgtcatcgctgcgtccgctgatgcgatccatgcggcgcatagtccgcgccgttcctggtaacagtcgggttaaatcacgcgtgcggtaacgaatgaccggcaatgcttctttggtcagcgtggtgaataacagttcgccatgttcaccatcggcaagcggtgtgccgtcatgaggattaacaatttcaggatagaaatgatcttcccaaatggttgggccgtcggtagtttccagacactccatcgccacccccggccccatcacttctgacaggccataaatatccagtgcggtgatccccaggcgacgctcaatctctttacgcatggcctgtgtccacggctcagcaccaaatactccaacccgcagcgagcaaccgctggcatcaccgcccaactgccgctccagctcttcaatcaggttaaggcaataagatggcgtaaccatgatcatatctggttgaaaatcacggatcagttgcgcttgtttttccgtctgcccgccagacatcgggatcaccgtagcgcccagacgttcggcaccatagtgcgcacccagcccaccagtaaacaggccgtaaccataggcaacatgaattttgtctttgggcgagccccctgccgcacgcaaagaacgcgctacaatattggcccagttatcaatatcgttttgcgtatagccgacaactgtcggtttacctgtggttcccgaagaagcatgaatgcgcaccacttgttccattggcacggcaaaggtgtcaaagggatagttgtcgcgcagatcctgtttggtggtacagggaaatttacgcaggtctgaaagttccctgaaatcatcaggatgtacgcctgctgcgtcgaatttgcgccgatacatcggcacattttcatacgcgtgtttgagcgtccatttcagacgctgtgtttgcaacgcctgtaactcatcaacagacgcggtttcaatcgggtcaagctttgtattggttatcattgtagggtactcgcaggttgatatgctcaaacacgctccagaatcatggcgatgccctgaccgacaccgatgcacatggtgcacaatgcgtaacgaccgttacgccgatgcagctcatggctggcagccagtgccaggcgggcaccactcattcccaacggatggcctaaggcgatagcgcctccgttggggttaacatgtggggcatcatcaggcagccccaattcgcgtagtacacccaacgcctgggccgcgaacgcttcgttcagttcaatcacgtccatatcgtgaatactcagccctgcgcgttccagcacccggcgagttgcaggcaccggaccaagccccatcaggcgcggttccaccccggcggttgccatggctacgatacgcgcccgcggtgtcagtccttgcgctgctgccatctgttcactggcaataatcaacgcagcggctccgtcattcaccccggaagcattgcctgcggtaatcaccccattggcacgaaatggtgcttttaacccacgtaactgttccagcgtcgtttccgggcgcagatgctcatcatgttgtatttctgttacaacacctttcttgtttttcaacacaaccggaacaatctcctcagccagaatgcctgaggattgcgcttttgccgtacgttgctgactgcgtagcgcaaaactatcttgatcttctcgtgagatttttaacagttcagctacattctctgccgtttccggcatgctgtcagttccaaattgctgagccatgagcgggttcacaaatcgccagccaatagtggtatcgaacatctcagcctgacgagaaaatgcactggctgccttgcccataacaaacggtgcccgtgacattgactccacgccaccggcgatcagcaaatcgccatcgcccgctttaatcgcccgtgcggcaaaccccagtgcgtccagcccggaaccacacaagcggttaatggttgtgccggaaacactctgcggcagccccgccagtaaagtcgccatccgggctacgttacggttatcttctcccgcctgattagcacagccgaggatcacatcatcgatacactccgcatcgagacgcgggtttcgcaccagcagttcccgcaaagggatagcagccagatcatcagcccgaacacttgataatgccccgccgtagcgaccaattggcgtacgaattccgtcacaaataaaggcttcacgcatcaggcttctcctgtaatggtgccgccgatgcggtgagatttaccgcgaaacagcgcaaccgttttttgttgttggttaacaatttcgatgtcgtaaacaccggtttgcttgccctgatgacgtacctgcgcagtagcagttaaggtgtctccggcaaagcctggacgcaaaaaatcaatcgtgcatgcagaagcgacggctgccagcccctggctattgcaggcgtaggcaaaggcagtatcagccagtgaaaatagctgcccgccgtggcaactttgatgaccgttaagcatttgtgcagtgacggtcatggtcactacagcaaagccttcatccattgagataatgtcgatgccaagcgctttggcgcaggcatcgttctcatacattgcatgggcattttgccaggccttatgactcataaccgctctccagaagcgcccgttggcgcagcaatgaacatgggcgatagcgttcttcgccatagtgatgctgtagattttcaaggagccttaatattcgctgccagccaagttgcgctccccaggcaagtgggccatatggataattcaccccaagacgcatggcggtatcgatatcctgttcagaggccatgcctttttgaagcgcatcaagggcttcattgatgatcattgctaccgttcgccaaatcagcattcctgggtaatctgcaatttgcagcactgttttgccctgctgttgcaggtaataaatggccttgcgggtcgctgagtccgggttcaccgctgcagcagcaatggtcaccaccttgcccgccattttatcgatcactaccaccgggcgtgccagtcgtattgccagcgcctgtgccgtctcgccttgtgtctcaatcaataaaacatcgtcaatttccgtgacaccgtcacttttcttttctactttcattgggctaaaactgtcgcttaccgcttccaggccaacaactgcctcacgttccgcgcgccagtcgtacacgcccagcccacttttcttgcccaaccgtccaccaatcaccagttcctgttgcaccagcgaaggtaaaaaacgacgctcctgccagaaagcgttaaacaccgaacaggtgacagcaaaattgacgtcctgaccaatcagatcggttaattccagcggccccatcgggaaaccagcgccatcgcgaagtgcagcgtcaatcacttctggtgcagcaacctgctcttccagtgcccgccaggcctcggaataataaggacgcgcaacacggttaacgataaatccaggagtcgaatgacagcgcacaggctgcttaccccaactcaacgttagttcacacaactgctcaacaacttccgccgccgttgccagcccactgaccacctccaccaacttcatcaccggtgccgggttaaaaaaatgcagccccgcaacacgttcaggattttttatctccgcagcaatcgcggttatagagattgacgaagtgttagtggtcaatagcgtttgtggcgggcaaacttccgccagctgtgcaaagagcgcttttttgacttccagacgttcagacgccgcttcaatgaccaggtccgcagctgccagcgcgtgaatatcggtcaccgggatcaggcgtttcaatgtgcgttcacaggtttcagcagtcagttttccccgcgtcacgcgtgaatttagccgcgcgtgtatcccgtcgattgcgcgggtcagcgcttcagcagaaatgtcatacagtaaaacctggtgtccatgactggcagcaacttcagcaatgcctgcccccatggtgccgctcccaatcactgccacagtttgcacatttatcatcatgctatttccccgtgaactgcggtgagcgtttagccaggaacgcactgacaccttcacgataatctgcgctccgtccggcaagtcgctgatagtcacgttccagatccagttgcgtatcgagcgtattggtttcagcgctatttatcgcttgcttgataagtccaagaccaaatgtcggttgtgtcgccagatgccgtgccagctgttgcgcggtatctgccagcgtttcatcatcaacaacctgccagatcatcccccattcgtgcgcctgttcagcactcagttgattccccagcagtgccagccccatggcgcgcgctcgtccggcaacgcgtggcagtaaccaggttccaccgcaatcgggtattaagcctaacttactaaacgccatgacgaattttgctgaacgggcagcaataacgatgtcgccccccagtgccagtgttgcgcctgcccctgccgccacgccattgactgcacagatcaccggttttggcagttttgccaggcgacgtaccagtgggttatagaaacgttcaactgacatccctaaatccggtgcggggcctgtgggatcaacgttacgatcgttaagatcctgaccagcacaaaatccgcgcccggcacctgtaagtaacaggcaacggatagtgtcgtcgcgctcgacctgtttcaggcactctgccagttgtgcgtgcatctcatcattaaaactgttcaggcgttccgggcggttgagcgttagtgtcatcacgcccttttctacatgactgaggatgaattccatcattagcgtcctttaaagtcgggcgtgcgtttttgtaagaaagcggagatgccttcatgacgatcttctgttgccgccagcaaggtgaataactgtcgctcctgggcaagtccggcttgcaaagccacttcctgcgactggcgcagcgcttgctttgccgcttgtaaggccagcggcgagtgacgtgccattttcgatgccagctgtaaggcgtattcgagggttaaatcgctggggaagacgtcgctaaccagcccggcctgctgtgcttgctgagcggtgatactttctccgctcagcaccattttgctggctaacgatttaccgacactacggattaaacgttgcgttccgcctgcgccaggcatgatgccgagagtgatttccggcaacccaaaacgcgcgttctctccggcaaccaccacatcgcacaacaatgccagttcgcaacccgccccaagcgcgtaaccattgacggctgcgataagtggtttattaaaggcctgcaatcgcgcccatagctgcggacgtgtatcgtttaaggtggccgcgagatctttttctgccatttcgttgagatcggccccagcggcaaaaaagcgtgcattaccggtaatcacacagaccgaaatgctggtatcggtagccgcagcttccagttcatttaccagttgcatcagcagggcattatttagcgcattacgtgcggcgggacggttaagggtcagcaacaatactcgttgctgacggctgacgatcagttcgctcatgccatccccttcgcgtcaaagtcaaccaccacatcgctggtcagcggcagtgcctggcaactcaacacataacctgcggccagttcatccggttccagactgtaattggtttccatcgccactttgccacgcagcactttgcatttgcaggtcgcacagacgccgcctttgcaggcatagggcagatccgccccctggcgcaatgccgcatcgagaatgctttcatcgtcggcattaagcacgatttcccgatcccgcccatcctgacgtacagtcactttttgtccgtcactttgcacgttaacgctacgtttgacgcgcgtgccaggcgtattaaaccgctccagatgaatggttttatctggcattcccagtgcttttaaggcggtttccgcgtcatccatcatcgccgccggaccacaaataaatgcctcatcataaagacgaaaattaatgagcgaggccccaagtgactgtaatttttcaccgtcaatacgcccgtgaagcagatcgctgtcgagggtttcctgactgaaaatgcacaacaactgtaaacgctgaggatatttgtctttcaggtctgccagtgcctggcgaaacatcatgctctggctggtacggttaccgtagatcagggtgaactgactttcaggctcggtttgtaaagtggtggcgataatcgccagcattggcgtaatacctgatcctgctgcaattgccagatagcgcccctggcgttcggcctgcggctgatagccgaaatgcccctgcggcaccatgacctccagcgtcataccctggcggatgtgttcgcgggcatagcgggagaaacgtccgccttcaatggctttcaccgccacactaatttcgccaggcagatagctgcggcaaatggagtaacaacggcgtaattcttcaccatcaaagctggcttttaaggtcaaatgttgaccggggcgaaagcgatacgcctcctgcaaaggctggggcaccgcaaaggtaatggtcaccgcatcacgggtttccgactcgacttttgccactgttaaggaatgaaacgttgtcatggcatcctcaaatacatttgaaataatcgaaaggttcgcggcaactatcgcagcggtacaatgctttgcaggccgtggaaccaaattcactgataagtgtggtatggacgctggcgcagcgcgggcaacgtacttctggcggcaaatgggcatggcaactgtgtccggcgggcgggctaatgccatactctcgcagacgctcacgggcatcgggggtcatccagtcggtggtccatgccgggtcgagttgcagcacaacctgaacgggggtaaacccgttggttgtcattgcctcacgtatcgcgccaatcaaatgttccgttgccggacaaccggaatatgtcggcgtaaagccgatcacccatccttctcccatctgtgtcacattacgcaccatgcctaaatcagtaatggtcagcaccgggatctccgggtccgggatctggctgagtagcgcccatatctcatgaacctgtggcggtgcaatggtggccagacgttgcatacccatctcctctgttaccattgctgaccgggcaagacacgctggagatactgcatttctgccagcatgggtccaaggtgttcggtatgcagtccttttttaccgccagtgcgatacgcctgctcttgcggtacgttcaatgtggcttcgttgatcccggcaaaaacttcggcttcccacgctgcgcgtaaagtgcgtggatcaaccgcaataccctcttcactcagtgcaatatcaatctcgtcggcatcgaacagttcggcggtaaaacgccacaacttgttgatggcctgctgcatcttttgccctgatacgtcagtaccattgcccagtcgctccagccagccacgactaaaacgcaggtgatagcgcgcttctttaattgctttggcagaaatcgccgccagttgcggatcacggctttccatcagacgggtaaagagcgccacatgccatgcatcgatgaaatactggcgtgcaatggtgtcggcaaaattgccgtttggttgttcaaccaacaataagttgctgaactggcgctcgtctcgggtgaaggccagggtatcttcatcgccttctcccgctaattcagcggcatacgataagaagttgcgtgcctgacctaataaatcgaggccaatgtttgccagtgcgagatcgatttccagttccggtgcgtgaccgcaccattcacccaaccgctgggagagcaccaggcagttatcgcccaggcgcaaggtgtaagccgttaactgattcatttccgacctcacatgtgctcaatgccatcagggatggtgtaaaacgttggatggcgatagaccttgctttcagccggatcaaaaaattcaccgcgttcttccggttgcgaggcaacaatttcactcgccttcaccacccaaattgaacatccttcgctacgacgggtgtaagcatcacgggcattttccagtgccatccgctcatcggcagcatgtaaactgccaacatggcggtgtgataagccctgtttgccacgcacgaaaacttcgtataacggccagtaaacattactcattttgaatctccttatgcgaccttacgggcatgttgtttttgtgcatgggccagcgctgcttcccgtacccaggtaccttcttcccaggctttacgtttggcgtcgagcctctcctgattacaaattccgcgaccgttaattacttcgttaaactcctgccagtcgatctcaccaaagcggtagtgaccgctttcagtgtcaaaatgcagatccgggtcaggaacggtcataccgagcatttcaacctgtggaacggtgttatccacgaaacgctggcggagttcgtcgttggtgaaacgtttgattttccaggtgagacttctggcgctgtttggcgagttatcatcgtttggcccgaacatcattaaggctggccaccagaaacggttaatggcgtcttgcaacatctgcttttgagcttcgctgccctgcgccagtgccatgcaggcttcaaacccctgacgctggtgaaaactctcttctttgcagattttcaccattgctctggcatacgggccataagaagtgcggcataacgccacctgattgacgatcgctgcgccatccaccagccagccgataacaccgatatcagcccaactcaatgtcggataattaaagatggaggaatatttcatccgtccgtcgagcattttttggtagatgtcttctctggcgcagcccagtgtttcggcggcgctatagagatacagaccatgaccggcttcatcctgcactttggccaacagaatggctttacgccgcaaggttggtgcgcgagtgatccagttaccttcaggcaacataccaacaatctcggagtgcgcatgctgcccaatctggcggatcaatgtctttcggtaagcatcgggcatccagtcctgtggctcgatagccgtttcctgggctatccgttgctcaaagcgttcttcttgggtcacgtcatcacctttacgattccagttttcgtgaattaattaaaaacacgaatcacattgttttatgaaagttacacaatagttaagtaaaatcacaaattttgtatgtttgaactgtgacggatttcgcaccctatttttataaatcattatttatcagtgcattaatgttttccgcagttgctatacagatcgcatagttaacatttcgttaaaagatcccttgctttttatgattcgcgatttaactattagcaacagaaatgtgaaacatctggagagtagcgatgcagcagttagccagtttcttatccggtacctggcagtctggccggggccgtagccgtttgattcaccacgctattagcggcgaggcgttatgggaagtgaccagtgaaggtcttgatatggcggctgcccgccagtttgccattgaaaaaggtgcccccgcccttcgcgctatgacctttatcgaacgtgcggcgatgcttaaagcggtcgctaaacatctgctgagtgaaaaagagcgtttctatgctctttctgcgcaaacaggcgcaacgcgggcagacagttgggttgatattgaaggtggcattgggacgttatttacttacgccagcctcggtagccgggagctgcctgacgatacgctgtggccggaagatgaattgatccccttatcgaaagaaggtggatttgccgcgcgccatttactgacctcaaagtcaggcgtggcagtgcatattaacgcctttaacttcccctgctggggaatgctggaaaagctggcaccaacgtggctgggcggaatgccagccatcatcaaaccagctaccgcgacggcccaactgactcaggcgatggtgaaatcaattgtcgatagtggtcttgttcccgaaggcgcaattagtctgatctgcggtagtgctggcgacttgttggatcatctggacagccaggatgtggtgactttcacggggtcagcggcgaccggacagatgctgcgagttcagccaaatatcgtcgccaaatctatccccttcactatggaagctgattccctgaactgctgcgtactgggcgaagatgtcaccccggatcaaccggagtttgcgctgtttattcgtgaagttgtgcgtgagatgaccacaaaagccgggcaaaaatgtacggcaatccggcggattattgtgccgcaggcattggttaatgctgtcagtgatgctctggttgcgcgattacagaaagtcgtggtcggtgatcctgctcaggaaggcgtgaaaatgggcgcactggtaaatgctgagcagcgtgccgatgtgcaggaaaaagtgaacatattgctggctgcaggatgcgagattcgcctcggtggtcaggcggatttatctgctgcgggtgccttcttcccgccaaccttattgtactgtccgcagccggatgaaacaccggcggtacatgcaacagaagcctttggccctgtcgcaacgctgatgccagcacaaaaccagcgacatgctctgcaactggcttgtgcaggcggcggtagccttgcgggaacgctggtgacggctgatccgcaaattgcgcgtcagtttattgccgacgcggcacgtacgcatgggcgaattcagatcctcaatgaagagtcggcaaaagaatccaccgggcatggctccccactgccacaactggtacatggtgggcctggtcgcgcaggaggcggtgaagaattaggcggtttacgagcggtgaaacattacatgcagcgaaccgctgttcagggtagtccgacgatgcttgccgctatcagtaaacagtgggtgcgcggtgcgaaagtcgaagaagatcgtattcatccgttccgcaaatattttgaggagctacaaccaggcgacagcctgttgactccccgccgcacaatgacagaggccgatattgttaactttgcttgcctcagcggcgatcatttctatgcacatatggataagattgctgctgccgaatctattttcggtgagcgggtggtgcatgggtattttgtgctttctgcggctgcgggtctgtttgtcgatgccggtgtcggtccggtcattgctaactacgggctggaaagcttgcgttttatcgaacccgtaaagccaggcgataccatccaggtgcgtctcacctgtaagcgcaagacgctgaaaaaacagcgtagcgcagaagaaaaaccaacaggtgtggtggaatgggctgtagaggtattcaatcagcatcaaaccccggtggcgctgtattcaattctgacgctggtggccaggcagcacggtgattttgtcgattaatcggtgaatgaagggcaacggcgaatagttgcccttttatttcactaagttttgtgacgttgtcacattatgcatgatgtgtacatctattttcagggcatccactgtatgaaaagctggcacacctgccaaacaacctggcaggtgcaggcaatcccctttgcatcagtactgataatgtgaacctgactaaaccgcccacagagcgcggttgctaacaagaacacaacatctgacgaggttaataatgggaagcccctctctgtattctgcccgtaaaacaaccctggcgttggcagtcgccttaagtttcgcctggcaagcgccggtatttgcccacggtggtgaagcgcatatggtgccaatggataaaacgcttaaagaatttggtgccgatgtgcagtgggacgactacgcccagctctttaccctgattaaagatggcgcgtacgtgaaagtgaagcctggtgcgcaaacagcaattgttaatggtcagcctctggcactgcaagtaccggtagtgatgaaagacaataaagcctgggtttctgacacctttattaacgatgttttccagtccgggctggatcaaacctttcaggtagaaaagcgccctcacccacttaatgcgctaactgcggacgaaattaaacaggccgttgaaattgttaaagcttccgcggacttcaaacccaatacccgttttactgagatctccctgctaccgccagataaagaagctgtctgggcgtttgcgctggaaaacaaaccggttgaccagccgcgcaaagccgacgtcattatgctcgacggcaaacatatcatcgaagcggtggtggatctgcaaaacaacaaactgctctcctggcaacccattaaagacgcccacggtatggtgttgctggatgatttcgccagtgtgcagaacattattaacaacagtgaagaatttgccgctgccgtgaagaaacgcggtattactgatgcgaaaaaagtgattaccacgccgctgaccgtaggttatttcgatggtaaagatggcctgaaacaagatgcccggttgctcaaagtcatcagctatcttgatgtcggtgatggcaactactgggcacatcccatcgaaaacctggtggcggtcgttgatttagaacagaaaaaaatcgttaagattgaagaaggtccggtagttccggtgccaatgaccgcacgcccatttgatggccgtgaccgcgttgctccggcagttaagcctatgcaaatcattgagcctgaaggtaaaaattacaccattactggcgatatgattcactggcggaactgggattttcacctcagcatgaactctcgcgtcgggccgatgatctccaccgtgacttataacgacaatggcaccaaacgcaaagtcatgtacgaaggttctctcggcggcatgattgtgccttacggtgatcctgatattggctggtactttaaagcgtatctggactctggtgactacggtatgggcacgctaacctcaccaattgctcgtggtaaagatgccccgtctaacgcagtgctccttaatgaaaccatcgccgactacactggcgtgccgatggagatccctcgcgctatcgcggtatttgaacgttatgccgggccggagtataagcatcaggaaatgggccagcccaacgtcagtaccgaacgccgggagttagtggtgcgctggatcagtacagtgggtaactatgactacatttttgactggatcttccatgaaaacggcactattggcatcgatgccggtgctacgggcatcgaagcggtgaaaggtgttaaagcgaaaaccatgcacgatgagacggcgaaagatgacacgcgctacggcacgcttatcgatcacaatatcgtgggtactacacaccaacatatttataatttccgcctcgatctggatgtagatggcgagaataacagcctggtggcgatggacccagtggtaaaaccgaatactgccggtggcccacgcaccagtaccatgcaagttaatcagtacaacatcggcaatgaacaggatgccgcacagaaatttgatccgggcacgattcgtctgttgagtaacccgaacaaagagaaccgcatgggcaatccggtttcctatcaaattattccttatgcaggtggtactcacccggtagcaaaaggtgcccagttcgcgccggacgagtggatctatcatcgtttaagctttatggacaagcagctctgggtaacgcgttatcatcctggcgagcgtttcccggaaggcaaatatccgaaccgttctactcatgacaccggtcttggacaatacagtaaggataacgagtcgctggacaacaccgacgccgttgtctggatgaccaccggcaccacacatgtggcccgcgccgaagagtggccgattatgccgaccgaatgggtacatactctgctgaaaccatggaacttctttgacgaaacgccaacgctaggggcgctgaagaaagataagtgattgtttcagacaaaaaaacggcaccaggtgccgttttttacttatgagcgaaccagattaataccgtacacacaccgacttagtttcacaccaaccgtccagccagtcggggccaaaatcacggcccgttcctgactgcttcatcccaccaaacggtaagttagcgtcaattaaggtatggctgtttacccacaccgtccctgcctgtaagcgatcgctatattccagagcctgggagagattttgcgtccagacactggcagttaagccatattccgtgtcgtttgccagttgtaacgcctcttctccatccgctactcgcaccaggtttaccaccggaccaaacacctcttcacgagttaagcgcaatttagcatcgggatttaccaccagcgttggcgcaacataatacccctctccggctggtccattcgacccgcgaatcagctctgcttgctgtgcctgcgcatcgtcgaggaatgaacacactttgtcgcagtgcgcacgagaaaccaaagggttaatctgtgcaacaggtgacatccccggtcccacttgcaacgattttaccgcctgctcaaatccactaaccagcgtgtcaaacaacggcgcttcaatataaattcgcgaactggcggcgcatacttgcccttgattcaggaagcttccggtcatcaagccttcaataacccattgcggatcagcatcttttaatacaattgccgggtttttaccgcccagttccagcgttacacgcgttaagtgatcagcagcagttctggcaataccttttcccgtcgcggttgaaccggtaaaactgattttcgcaacatgaggatgtgacgtcagggccgcgccgcatacagcacctgacccggtgacgacattaaaaacgccatcagggataccagcctcgctggccagttccgccacgcgcaacatcgtcagtggcgtggtttccgaaggcttaatcacgattgaacagcctgctgccagtgctggcatcaccttccacataccaatcatcaacggaaagttccatggcacaattcccgccactacgccaaccggctctttacgcgtccaggcctgataacgcgccccctggggtaagggaatcgacaagtccagcgttttacccgcgattttggtcgttaacccggcggtataacgcatccagttcagcgtacagcccacttcaaaagcacgggaaatggcaattgacttgccttgctccagggtttccagttgcgccagctcctcactgtgctgctccaccagatcagcaaaacgtagcagaatacgttcacgctctgcgggtaatcgcccggcccagcgacgcgagacaaaggcccgccaggcagacatgactgcgttatctacatccgcttcgttggcatcagcagtagacgcaatttcttgcccggtggccggatcaaagatcgccaaccgtttttcactttgtgcggggccaggacgaccatcaatataaagaccgtgttgacgatcgagaaactgttggacctggcttaatactgctacatgcggctctgtcatcacttttccttattatttacccagtgtgatttcagtgtacgcagcgacaagaaaagtcacttttttcgctgtgacattcgctttgtcagctgtgacaagctccgcaaatcgtgacaataaccgcttatgtctctatgcctgacaagacttatttcctatagtcaggctcattagcttcgtttattgcaacacaaatgcaacaataaaaatacatttcacagagcgaaaacgtgccatgaaccccgcagtggataatgagtttcagcaatggctttcccgaatcaatcaggtatgcggaaattttaccggacgcctgctgactgagcgttacacgggtgtactggacacgcattttgccaaaggactaaagctgagtaccgtgacaaccagcggggtgaatttatcccgcacctggcaggaagtaaaaggcagcgacgatgcctggttttacaccgtttttcagcttagtggtcaggcaataatggagcaggatgagcgtcaggtgcagattggcgctggcgatattacgttactcgatgcctcacgcccctgttcgctttactggcaggagtcttctaaacagatttcattacttttgccacgcactctgctggaacaatattttccccatcaaaaacctgtctgcgcagaaagactggacgctgacttacccatggtgcaactcagtcatcgcctgttacaggagagcatgaataatccggcactttctgaaacagaaagtgaagctgcgctacaggcgatggtgtgtctgctgcgcccggtacttcatcagcgggaatctgttcaacctcgtcgtgaacgtcagtttcaaaaagtggttacgttgatagacgataatattcgcgaagagatattacgcccggagtggatagccggagagacaggtatgtcagtacgtagtttgtaccgaatgtttgccgataaaggtttggtagtcgcgcaatatattcgtaaccgtcgtctcgatttttgtgcagatgcgattcgccatgccgcagatgatgaaaaactggcaggcatcggctttcattggggattttctgaccagagtcatttttcaacggtatttaagcaacgctttgggatgacgccaggcgagtatcgacgtaaattccgctaactaattggcgttgcatgtactgcaacgccaattagttaaaacagatatttgactatgcatttttcagggcaaaaggcaatttgacaggagtttttgaatattcaccttgtttcaggaaaatagatcaatcgccttctcctgtagcgttatcccgatattgcggttttgctattaaaattttcgcacccatttaccgtttatcccttgtacatattcccccggtttggcccgagctacgagcttttgcccggcgagtttcgcgatatcatctaccgacacattattttgctttgccagttgttggtaactcgctttacgttcggcattaatgtcggctactaatttctctgtttcagcatccgttttcagcgcaaccagataaccgtaaaatgtttcacctacccgcccctgagttctggcttcatccagagtcaatgccattacattgctgcttaccagcccaacaagaaacgcacaaagaagtaatgttttcttcatcatcacctcagaaaagatcgctacgagtttcaagcagctcttcgacatctttgtctgccttgatgatgatctcatgctcaattttaacgttcatattgatagtgatcggttccttaggtgcagcgacttcaatgcgaggcgtacagccaaccagcataaaagatgacgtcaacgcagccagtaaaattttcattgtttttcctcacactcttttccttgcggacagtcatttcccggcagacgtgcgttctgctccagccatgcctggagattatcgccaaagcgtaaactgcgccacagcgtaaaaatattctcttcatgatggtaattaaggtttaccgtaccgcttttaccatcaacgcgactggtacctgtaatgttggcctgcatggttaataaaccgagattatctaaattaatttttgtcgatgaacggctaatttccatatagcgcaaccagttaattgctgaacccgcagtcatattgtcttttaccaccgcatccgcagtgtctttatccagtcgcaatgtcatcggcccgctattcgccagccagccatctttcacaatccatttttcattgttcagccataacggcagtgcaccactaaatgccccggacatggcgaattgtttcggattgacggcgctaaccagttcgctggatgagagattattcagccgcaacagcgccgggtcatgttgcggcatacgtaattgtttcatcagtacgttaccgcctaacacatcgacgctaacatcagtcaacagcaagggttcttcttcagtccacggataacgcccttgcaaatcagccgtaatatttttcgctgtcaccagattaatcacttcggcaattcgcaacgtaacggggccgcgagtccccagatgccaggctccatcggcaaaacggaaaggcaggacaaaatcgacaccgttaacctgattatctggcatccaggcactaccgcctttcaacacgccgtgtcctcccgcgcggaatccttgttcaggcgcagcagaaaatgcaacctgagcatacagttcaccatcgcgtaagttcatcttccagtcgggtggcaccagcggctggaatacggtcagtgattgtttaggccaccaggcgttaccgcgcagacgaataccgtcccagcgaccatttacccgaaccgggccaatctcaccagcatgtaaatcgcctttaaagaggaaataggtaggatcgcgcccatcgacgctaaattttaaggttgatggcggtaacacactgccgccagtgaacagcgtttgcccggcgtccagtgacagcgcgccgctaaaggagggatgctgtgcgtcacgtacccagacgatgggcttgtcgagaattaatcgcggcttttctaccgtcatcgtaccgtattgtaactggtcgaaaccggtggagagatcggtcagcgtaatcgtgctgtcatgccactcaccttttcctgcgacatcccaggtggcattcatcggtgtaaaactcccttttccccagtagcgccactgccagcggccagcgtcagggagaaaatcattcgccagcccatccatatgcagcacgaaatcgcccagttcattttcatgcgcctgcaagatggcctgcaaacgtccgtcaacaccacgttgggtgacttttacacccgctaaaggccagcggatttcatcgatgtccagcgaatcgatgactcttccctttgaacgaagtaacgcgcctggctcaaaggtcagcgttgggtcagacagacttccacttagctgcgcaggtaaacgggcatataaaatgaggtccgcctgtttcgcttcaccggtcagctgcagaggcagctgactgttatccatgcttaattttcctgggccaaaattaagcaccgcgttgcccttacccgcttgcccctgggtcagcacactcagtcgtccgctgaccagagcgttctcaagccctgcctgccagttgtcgactttgacacccagtcggccactcaaaggaaaacctgcatacggccagctccagcgaccatcgcttacggtcaattgttgacgagtaatttgccacggcaaatcgagcaacggatcgccgttatcccgtgccagcacgatcaattgcccgctattttcctgccagtccagctcggcatccaccagtgacggttcctgcggcaagtttaacgtcgcagtagcatgcccacttacaggaagtccatccggcacgagcggcatagcaaattcccccaccagttttaccggcggctgattttcaaacgcgacgacatccagttcgctgactgtaagttgttgccctttcagctggccttgaaatttaactttttcgccctgataacgcagttgctggatatcagaggttaatgcgagagagagttttccctgccattcctgccagggagaaaaaatcagtttatcgatattgatccaggtgttaggcagcatggcctgccactgcgcgagtgtttttggagcggctggcgattgctccgtctgcggcaatttcgccagacaagcagaatcaagttctaccgtgccgacgttcaataaccagcggctgggatgtgaaaggctggcgttggtgatatgcgcaagctgacaatctcccaccagataacggagatcgggaatgattaaacctttacgcgtaatgcgtgggctttcatctaatgcaatacgtgtcccgagcggtagccagatgcccgccagcgtgggaacccacagcccgagcgtcatcagcagcgtcaacggcacaagaataatcagtaataacagcgcgagaacggctttatatttacccagcatgggtagttaatatcctgatttagcgaaaaattaagcattcaatacgggtattgtggcatgtttaaccgttcagttgaaggttgcgcctacactaagcatagttgttgatgaatttttcaatatcgccatagctttcaattaaatttgaaattttgtaaaatatttttagtagcttaaatgtgattcaacatcactggagaaagtcttatgaaactcgccgtttatagcacaaaacagtacgacaagaagtacctgcaacaggtgaacgagtcctttggctttgagctggaattttttgactttctgctgacggaaaaaaccgctaaaactgccaatggctgcgaagcggtatgtattttcgtaaacgatgacggcagccgcccggtgctggaagagctgaaaaagcacggcgttaaatatatcgccctgcgctgtgccggtttcaataacgtcgaccttgacgcggcaaaagaactggggctgaaagtagtccgtgttccagcctatgatccagaggccgttgctgaacacgccatcggtatgatgatgacgctgaaccgccgtattcaccgcgcgtatcagcgtacccgtgatgctaacttctctctggaaggtctgaccggctttactatgtatggcaaaacggcaggcgttatcggtaccggtaaaatcggtgtggcgatgctgcgcattctgaaaggttttggtatgcgtctgctggcgttcgatccgtatccaagtgcagcggcgctggaactcggtgtggagtatgtcgatctgccaaccctgttctctgaatcagacgttatctctctgcactgcccgctgacaccggaaaactatcatctgttgaacgaagccgccttcgaacagatgaaaaatggcgtgatgatcgtcaataccagtcgcggtgcattgattgattctcaggcagcaattgaagcgctgaaaaatcagaaaattggttcgttgggtatggacgtgtatgagaacgaacgcgatctattctttgaagataaatccaacgacgtgatccaggatgacgtattccgtcgcctgtctgcctgccacaacgtgctgtttaccgggcaccaggcattcctgacagcagaagctctgaccagtatttctcagactacgctgcaaaacttaagcaatctggaaaaaggcgaaacctgcccgaacgaactggtttaatcttgccgctcccctgcattccaggggagctgattcagataatccccaatgacctttcatcctctattcttaaaatagtcctgagtcagaaactgtaattgagaaccacaatgaagaaagtagccgcgtttgttgcgctaagcctgctgatggcgggatgtgtaagtaatgacaaaattgctgttacgccagaacagctacagcatcatcgctttgtgctggaaagcgtaaacggtaagcccgtgaccagcgataaaaatccgccagaaatcagctttggtgaaaaaatgatgatttccggcagcatgtgtaaccgctttagcggtgaaggcaaactgtctaatggtgaactgacagccaaagggctggcaatgacccgtatgatgtgcgctaacccgcagcttaatgaactcgataacaccattagcgaaatgctgaaagaaggtgcacaagtggatctgaccgcgaaccagttaacgctggcgaccgcaaaacagacattaacttataagctggcggatttaatgaattaatagctgccacagctcccggcggcaagtgactgttcgctacagcgtttgccgttgggtaatgcacacatcccaatcgccgtaccatccagttgacgggcaacagaaagcgaaccgccgatcattgcacaatttgcttctccactactggacatcgacgcttttaaacctggcgctacgtgcgcggcagtcgcctgctgaacaggttcactactacacgccgacaacaataaagcggcacaccctacccaaaacgctgctcgcatcttttcttcctctgatcttcaagccaaacgacaccgccataaataataggcagcacagagggcggcgtcgagagctgtcctgcgcgttgccccgcatttttacttttttatggctatttttttgccctctgtttgatcaaaacattcattacgctgatgtgggggacacaaaagcgaaaatgcagaagaaagccatttgctaaaattgaaagattactactgggcgcgcagcaatttcgtgcgcccctcatttgcgcaatgtaagggtgtcatatgattactattgacggtaatggcgcggttgcttcggtcgcatttcgcaccagtgaagttatcgccatctaccctattacccccagttccacgatggcagaacaggctgatgcctgggccggaaacggcttaaagaacgtttggggagacacaccacgcgtggttgaaatgcagtcggaagcgggtgctatcgctaccgtgcatggcgctttgcagacgggtgccctttcaacatcgtttacgtcatcgcagggtttgctgctgatgatcccgacgctgtacaaactggcaggcgaactaacaccgtttgtcctgcatgtagcggcacgtaccgttgccacacatgcactctctatttttggcgatcattccgacgttatggcggtgcgccagacgggttgcgcgatgttgtgtgcagcaaacgtccaggaagcgcaagactttgctctcatttcgcaaatcgcgacgctgaaaagccgcgtgccatttattcatttctttgatggtttccgcacgtcccacgaaatcaataaaattgtcccgctggccgatgacacgattcttgatctcatgccgcaggtcgaaattgatgctcatcgcgcccgggcactcaacccggaacatccggtgatccgcggtacgtccgccaatcctgacacttatttccagtctcgcgaagccaccaacccatggtacaacgcggtctatgaccatgttgaacaggcgatgaatgatttctctgccgcgacaggtcgtcagtatcagccgtttgaatattacgggcatccgcaagcggaacgggtgattatcctgatgggctctgccattggcacctgtgaagaagtggttgatgaattgctaacccgtggcgaaaaagttggcgtgctgaaagttcgcctgtaccgccccttctccgctaaacatttactgcaagctctgccgggatccgtacgcagcgtggcggtactggacagaaccaaagaacccggtgcccaggcagaaccgctctatctggatgtaatgaccgcactggcagaagcctttaataatggcgagcgcgaaactctgccccgtgtcattggtgggcgctatggtctttcatccaaagaatttggcccagactgtgtactggcggtatttgccgagctcaacgcggctaaaccgaaagcgcgctttacggttggtatttacgatgatgtgaccaatctgtcactgccgttgccggaaaacaccctgccaaactcggcgaaactggaagccttgttttatggccttggtagtgatggcagcgtttccgcgaccaaaaacaatatcaagattatcggtaattccacgccgtggtacgcacagggctattttgtttacgactccaaaaaggcgggcggcctgacggtttctcaccttcgagtgagcgaacagccgattcgttccgcttatctcatttcccaggctgattttgttggctgccaccagttgcagtttatcgataaatatcagatggctgagcgtttaaaacctggcggcattttcctgctcaacacgccgtacagcgcagatgaagtgtggtcgcgcttgccgcaagaagttcaggccgtgttaaaccagaaaaaagcgcgcttctatgtgattaacgcggcgaaaatcgcccgcgaatgtggcctggcggcccgtattaataccgtcatgcagatggcttttttccatctgacgcaaattctgcctggcgatagcgccctcgcagaattgcagggtgcgattgccaaaagttacagtagcaaaggccaggatctggtggaacgcaactggcaggctctggcgctggcgcgtgaatccgtagaagaagttccgttgcaaccggtaaatccgcacagcgccaatcgaccgccagtggtttccgatgccgcccctgatttcgtgaaaaccgtaaccgctgcgatgctcgccgggcttggtgacgccctccccgtttcggcgctgccgccagacggcacctggccgatgggcactacgcgctgggaaaaacgcaatatcgccgaagagatccccatctggaaagaggaactctgtacccaatgtaaccactgcgttgccgcttgcccacactcagctattcgcgcaaaagtggtgccgcctgaagcgatggaaaacgcccctgccagcctgcattcgctggatgtgaaatcgcgtgatatgcgcgggcagaaatatgtcttgcaggtggcaccggaagattgcaccggttgtaacctgtgcgtcgaagtttgcccggcgaaagaccgtcagaatccagagattaaagccatcaatatgatgtctcgcctggaacatgtcgaagaagagaaaatcaattacgatttcttcctcaacctgccagaaatcgaccgtagcaaactggaacgtattgatattcgtacatcgcagctgattacaccgctgtttgaatattcaggtgcttgctccggttgtggcgagacgccgtatattaaattactgactcagctctatggcgaccggatgttgatcgctaacgccactggctgttcttcaatttatggcggtaacctgccctctacaccgtataccaccgatgccaacggtcgtgggccggcatgggcgaactctctatttgaagataatgccgaatttggccttggtttccgcctgacggtcgatcaacaccgtgtccgcgtgctgcgtctgctggatcaatttgccgataaaatcccggcggaattactgacggcgttgaaatcagacgccacgccagaggttcgtcgtgaacaggttgcagctttacgccagcaactcaacgatgttgccgaagcacatgaactgctacgtgatgcagatgcactggtggaaaaatcaatctggctgattggtggtgatggctgggcttacgatatcggctttggcggtctggatcatgtattgagtttgacggaaaacgtcaacattctggtgctggatacgcaatgctattccaacaccggtggtcaggcgtcgaaagcgacaccgctgggtgcagtaactaaatttggcgagcacggcaaacgtaaagcgcgtaaagatcttggcgtcagtatgatgatgtacggtcatgtttatgtggcgcagatttctctcggcgcgcagctgaaccagacggtgaaagcgattcaggaagcggaagcgtatccggggccatcgctgatcattgcttatagcccgtgtgaagagcatggttacgatctggcactcagccacgaccagatgcgccaactcacagctaccggcttctggccgctatatcgctttgatccgcgtcgtgccgataaaggcaaactgccgctggccttggattcacgcccgccgtcagaagcactggaagaaacgttacttcacgagcaacgtttccgtcggctgaattcgcagcagccagaagtggcagaacagttatggaaagatgctgcagctgatttgcaaaaacgctatgacttcctggcacaaatggccggaaaagcggaaaaaagcaacaccgattaaatgctctggataaggattatccaattctaaaaaaaaagcccggacgactgttcgggcttgtctttttatatgttggaaaatcagtggcaatgcaatggcccaacagaaaataaaatctgtgacaataaaggcatataacccgcgcagaataacgtatagcaaattaaaagtataatttttattttgtatgtattatcttcgatacattcaccagacttattatcatttcagaggaattatttgattaaggttttacttaaggcgtaacaaatgatatttatcggctaactgaacttctcctttaggatgttttcactccccgaaatggggataaaaggcaaatgaaataactaaaggatttattcaatgaaaagcaaagtactggcacttttaattcctgccctgctcgccgcaggtgctgcacatacagccgaagtttataataaagacggcaacaaattagatctgtatggcaaagttgatggcctgcattatttttctgataattcagcgaaagatggcgaccagagctatgcgcgtctgggttttaaaggcgaaacccaaattaacgatcaactcactggctacggtcaatgggaatacaatattcaggcaaacaacactgaatcttcaaaaaaccagtcatggacccgtctggcatttgccgggctgaaatttgcagattacggttctttcgattacggacgtaattatggcgtaatgtacgacatcgaaggctggaccgatatgctgcctgaatttggcggtgactcttataccaatgcagacaactttatgactggtcgagccaatggcgtcgcgacttatcgtaatactgatttcttcggtctggtaaatggtctgaacttcgcggtgcagtatcaaggtaacaacgaaggagccagtaatggtcaggaaggcaccaacaacggacgtgatgttcgccatgaaaacggtgacggctggggtctttccacaacatatgatttaggcatgggctttagcgctggtgcggcatacacctcttctgaccgcaccaatgaccaggttaaccatactgcggcgggtggtgataaagcagacgcgtggactgctgggctaaaatacgatgctaacaatatttacctggcaaccatgtattcagaaacgcgtaatatgaccccgtttggcgacagcgattatgctgtggcaaacaaaacccagaattttgaagtcactgcacagtaccagtttgattttggtctgcgtccggcagtctctttcctgatgtctaaaggccgtgacctgcacgctgcgggtggtgcagacaacccggcaggtgttgatgataaagatctggttaaatacgccgatattggcgcgacttactatttcaataaaaacatgtccacctacgttgactataaaatcaacctgttggatgaagatgacagcttctacgctgccaatggcatctctaccgatgatattgtcgctttaggtctggtttatcagttctaaatcctcctgcccgctgttatggcgggctttttctgcttattcttcctcctttgatctaaattaaaaatgtgaactccgtcattacacaaaaagtgtcatctggcgttacactttatgcggatactaaaacaggaggttttatgaacagaacgattcttgtccctatcgatatttccgattcagaattaactcaacgcgtgattagccacgttgaggaagaggcaaagattgatgatgcagaggttcatttcctgacggtaataccttcactgccctactatgcctctctgggtttagcgtattccgcagaattaccggcaatggatgacctgaaagcggaagccaaatcgcaactggaagagatcattaaaaaatttaaactgccaaccgacagagtgcatgtccatgttgaggaaggctcgcccaaagaccgcattctggaattggcgaagaagatccccgctcatatgatcatcattgcttcccatcgaccggatatcaccacttatctgctcggttccaacgccgcagctgtagtgcgtcacgcagagtgctccgtgctggttgtgcgctgacactaacgcccgcacattgctgcgggctttttgattcatttcgcaaatgtgctgacattttcccctctaatccgtaccatacacgccacagttttttatatcagatttcttatgctgggcgttccggcatgacgcatactcttctgatgccatataacgaattgagtcgcttttaaatgtcgcaaaatcaagaaattagtaagaaagaacaatacaacctgaacaagtaagggcaaaaatcacaactatctgactcataagtgttttacttatttttcaatgtgttaaacatcatcagcgagaacaataaactacgataatccactctttttttgccccttttttgccccttttgcagcgttttgccccatttttgccacaaaaaaaaattccaaaacgtctcaatcaaagtcaaaccaaccgcagcacgttcttgcatacgacgtgactgcggtttttcaactattcagatacatcactcccatcacattcattcctccgcatcataggcatataggctatatcaccttgatatttttcttcttcagataaaaactgttatctatgtatacttttaaacccaatctgtgtagagtctctgcataagatagtttgcagttgccgcttcagcttgcgccataaaccgcctgatttttgctgccacctgttagcattcctgtatacctgaaacgacaatgtttatctacgaacttttaaaaaatcagcagcatacagtttactggcatgcatacgctaatgcgacagagccaaatgaataaggatatacaaaaggagcccaactggtgaggaagggctccttttaattactagacgtttttactacttaactttctgtcggagtaaacggaaaattaatttgttaatcactgtcagtataagtacccgataaacgtggtgcaactccgtatcagaaattaccgccagtgcttgaatccagcgccctgaacagggcttcatgagcggcatccagaaggcgtccaggcagaaggacatcattcacgcggtaactctgaccgttctgtgtggtcacggtgaggtaatattgatcgtcaaactgcctatcggcaccgatatgcacaatgttggacgtgtcgatccagcacaggtttgtgccttccacaggatgaagaggtttgattcggcctttcagccatttctgcgggcgtcccggccaggatttaatggtaatgccgtgcttatagtcgcgggttctggccacaaaggccgctactttatcttcatccatctcttttgctgaggtgttctccttgaagtagtacggattgaggttgtattgcagctcttcaaatagcttcatatacgtcacctgatcatccaggctttccccctgatttttcaggctgctgccccaaacttcttccagattggctttcagcgccagcgtgaccgcctcaaattcttcctgatgtttatcgtagtagttgatatccatcgcgtctcctgttgtgtttatggcgaatttgcggaaataatatacataaaaaatgttcaaatatgaacattttcaggctataaatacaggcagattataacaggccagtccaccaggattcggccaggagctgagtacgcatgataaagaaaccacttattgccggcatcatgctggttgtggcgcacaccgccggcgctgcgcaggttgatgataccaatctgcagcagatttataccgaggcgggcattcagggtatatgcagcgccgggatgctggctgtgccggaaggggccagagatgaagttgtcccgcagaacgtcagacacctcctggttcagtgtgcctatttcgacgagcagcagttgcgccggcgtgccggccttccggctcagacatttagccactggcgtgaccgcaatgcggtccttaatctgtcgtctgaccaggtatctgatgcgctctggctgtcagcgtggcgtgatttccgggcacaactggcctcggcctacccggccccggcggaaaaaaaggcacaggggaaagaggccgtacccgccggcacgaagcccggcactgagcatgggagtgcggcggattgaccggctttgacttgatcctgtggcgacggggcctgaactggacccaggaacgcgccgcggctgagctcggtatcagccgtaccagcctggtaaaatatgaggacggtgagacagtaccccggaccatacaacttgccaccgtcgcgctgacgctgaaagcggaatggcccaccctgaaaaccatgagcaaagacaggctgctgcggcagctgaagtatgaagtgctgaggatcgataatgaatgagtccatccatgttgtcggctcttttatccttgcgggtatcctgctgtatggcctctggcagggtacacggcgacgccggcgccggcacgaacggaaacaggccagcgcggtacgtgtgatcgataaaattaatacgtttccgcatttcgggcagaaaattgcctatctgcgcaagattgacccgtttgtgttcgaagagctgctgcttgaaggctttgaacgccggggctttgaagtgatccgtaaccgccggtataccggtgacggcgggattgatggccgtgtgaagattgatggccagacctggcttatccaggccaaacgctataccagctatattgccgttggccacgtccgtgacttcagcgacctgctgaacgccaccggtgcccgcggttttttctgccataccggcaaaacgcgcgaaggcaccaaatcgctcattcgcggagacagccgcatgatcctggtcagtggccagaagctgctagaccttattgccaccgatgcgccgtttatcccgtatccgggataccggccaccgaccgaaatggttcatcctgaacaggagacaacatgaaattcaaaggatacgtcgccgccctgccggcactgctgctgacagggtgcgccatgctccccggacagcccaccgattatgaccgcttctgtaacgtctcaggcatcgccagccacggcgaaacctaccgtgtcagtgacagccaggatttctggttaaccccgaacggccgctatctcagccaggctgagtacagcagtccggcagatacgcttcagaaactgacgggcgtggtcagtggtgaagatcctgaccaggtgcggaagaacgccgtcagggtaagggtgttccgcgtcgagagtgaaaacagccataaaggtgcgtgcctgcctgtgcgttatgacgataatggcgcacagcgtaaaatggattcactgactaacggccgccgtatggtggtattcagtgaagatgaaggtcagtctggtcagcagatttacaacaaaagtcgtggtacaggattcagttacaggttgttatgagtggattgaaaggccgccgaatcagcgcggatatgtttgctatgatgttaaaagtatctgccgggcagctggtttttgcagcccggcatgacaagcctttacgcggactgaccctacccccttacagaatcgaaggcgggaaaagctggagctcgaccgcctccacccgcagtatgacgtttgatatgcaggatgcggtcgaattcagcgagaaatttcataaaattcagtcgcctgacggctgattagcggattttaaaaaattgaacactttccccctacaaatttcccagaattcacgtagcgacgccatcgggaccgggcgcgtgacatatgcctacttcgattatgccgatgcgctggcgctgcgggagatggccagccaggctgatttacccaaatacctgctggccccggaggtgtcggtgtttctgcggtatgtgccagacctgcgccagcaggtccttttcgataccctctggaacacgggcgcgcgtattaatgaggcgctggcgctgaccggcgccagctttcagcttgacggttcccggccgtttgtccggctgaagacgcttaaacagcgtcagcgtggccgcggcaggccgggcaaggatgaagaggtgttccgtcttgttcctctgaccgatcctcaatatgtcaggaaggtgcgtgaatttctgaccaccctgcgtattggtaaacagcagctgctctggccggtgcagagtgataacacgccgcgtaactggatcaggaaggcactggacctcgcaaaacgtgactctgtcacttttagtatccctgttacctgccacacgttccgtcacagcttctgtatgcacctgatccagcatggggttccgctgaaagttgtacaggcttatgccgggcattcccggctggaaaccacagaaacctacacgcgcgtgtttgcgctcgatgttggtcgtcagtatggcgtccgattcagcctgccagacagtcatttaacgctcccggaataatctgtatccctccctgatatttccgtataaatctaaataaatcccttttctttctatgtcagaccgttttcaggacggtctgaccgtcttttgttgatttttattcggtatttttctgtatttttctatattggtgcatctttttgtctttacacgtcagcagagatgcgtaataatccatttgaaagctgtatttttcctgatttctacggtttttttctaaataatgtgaggttcaaaatgcgtatttttgttgatgacggttccaccaacatcaaactggcctggatggaagaaggcgcagtgaaaacgttgatcagtccgaacagcttcaagcccgaatggtccatgacattgctgacagattcatcggtgccggcttccgccaactatgaaattgacggggaaaagtacagctttgaccagctgagcccggatgccgtgcgcaccacggaaacacgctatcagtacagtgatgtgaatgtcgtcgctatccaccatgccctgatgcagtctggcattgaaccgcagccggttgatgttgtggtgacgctgccgctgggcgagtacctggatgaaaacgatcagcctaatatggccaacatcgagcggaaaaaagcgaacgtgaagcgcgcggtggccgttcaggggcgtgagagctttaccgtgcgtaaagtcagcgtactgccagagtcggtccctgcaggcttcagtgtgctgaaggatctggacgatctggactccctgctgattgtggatatcggtggaaccacgctggatatcgcgcacgttcgcagcaaaatgtccggattcaccaagacgcattgcgatcctaaaaccggcgtatccatcatcaccgaagccgtaaaacatgcactggataccagtgtgagcacccgtaccagttcgtattttgccgaccgtctgatccaggcgcgaaatgacgaaacgtttctttcccgttacctccagaatgctgaccagcgggcccaggtgatgaaggtactgcatgagcgggaaaaagccctgacgcaccgtgtcaccgattcagttggccgctttgccggcttcacgcacgtcatggttgtcggtggcggtgccagcctggtcgccggcgcagtgaagcaggccacgggggtgagtgacgatcgtttcttcgtcagtgataacccgcaattcgatctggttctgggtatggtggcaatgaagggctgagtatgactgataaccgtaagtgctcgttttatatctacccggagcgcaatgcggcggaccgggtagccgacggctttcttgagaaactgcctcagaaagagcgtggccgcgcgatgcgcgccatgatgctctgtggtgccgcgttgatgaagcaggacgaacgcctgccgttcctgatcgctgaattcctgacggagagcaccacgatgcaggatattcagcggatcatcagcagtacgctgccgcagcaggatacaggagaaatggcgcgtctggttgaggcgtttctgcaggccaccggcggtggcagcaatacggtgtcgccggcaggcggcgctgcgccggaaaacagtcccgccgtggctcccgaaccggcagcaccggaggataagaatctggaagaaacccgtaagaacgtccagcatctgttcccggatgatgattaagggggctgcgtgaaaaaatatgtgctgttaaccctgaccctcatcgccggcgccgtggcagcaaacccggtaacagcggccggcaatattgccggcgatgtccaggcgcaagctgcgactgaagtgaaaaccgggttttcacccggcgggaccgcattaaatctggttctggattcaatcgaccacgcgcagcatgagattctggttgccgcgtacagcctgaccagtcgtcctgttgccggcgcgttgcgtgccgcaaaaaaacggggcgtatcggtggtggtggtggccgatcgcaaagcgaacgacaaccggtacaccgaagtgaactttctggccaataaccgcgtggcggtgcggatcaacgataactacgaggccatgcatgataaattcatggtctttgaccgccgcgccgtattgaccggctcgtttaacttcagcgccagcgcagacagtcgtaatgcggaaaatgtggtgctgatcagcggcgcgcctgcagtaactgaagcctacgtgaacgagttttcccgtttatggggcgaaggaaaggacgtggctccacggtactgacctacagcagcggcagaaactctgccgcctgatttttaacttgatttatatggctcattcgtcgtattatcaaggctcatttttcggtagcgccccgactggcgaaggagtaaaaccatgcaatcattccccctgttcgtttcccgtgtcgttcctgtgatcaccctgagccattgtctgcggcagcggcgctggtccctgcacaacacgccatgccagattgacctgagatcaggttgtcacctgcgctcacagcctttcggcacgctatccagacgggaaataagcgaccggccaccggctatgccccgcggttactggttcaggcaatgcagccgggatgtcatgtttacggggcgcatcgatcaggcagatcctatgaaacaggtctattacaacgaaggctggagcggtccgaacaagtatacgtttgaagtttatcagctggagaacgggagttaccgggcgctggcccgcaaatggaatggcaaaatcaacaaggtgcagcaggaaacgcagtacctgtctgacacgcgggaggggctgaagcaccaggactatccccgcacgcgccaggtgaaaatttttctgaattcagacttctgggagaagggtaatgattaagatggttagcgtcgttccgcagccggaaacagtgaagacgctccgggaaaaaatgggcatgactgaaaccgcattaggggctgtcatggggtacgaactgcgcgcctggcagcgtaaggaagctatcagcgacgatctcagccagtacaacaagaccagtcttcgcccaggcgaatataacatgctgatgctgatcgccggcgtgcatcctgattaccgcctgaacagggcattcagtcctgatgatatggtcaaagatcccgccacggccgaagacgttcgccgcctgcgtctggcgctggggctgaagcacgctgaaattgcagcgctgtttggctataaaccggcgtcatggcagaccaaagaaaaggctgctcagcgcggcgtaaagctcaagaccggggaattcaatttcctgttacttctggccggtgagcatccgtcactgcagctggttgagaaggcgaaataaggcccgcggcgaccagagaggaccctttatgatcaccacacgccgaatgttaatgctgtatgcctgccttgtgcccgtagccctgacagggtgtgatctggctgattatttcccgaatgtgccacagcccgtgcccgtgatttcgcccggctatcaggttgatatcgatggccacccggtccgaatatcaggatttgatgactgtccgcgggaaaaagatgaagcccggcacgcagctgcacaagatgagaaaggctgcattgtgctgtctgcagagcgttccgaggtgaaggtcagactgtatcagccagccggcgccgtcaccgaaacctggcggatcatccgggaaaaagacgctcgccagaacgatattattcgcctgcagcgcccgaacggtgcgcttgtgatgcaaaatttacaggggaaagagtctccttaaaccagggaaataacaaaattaacttgatttatatggctcattagacgtataataattacatcgaaaggcaatccggtctttcgacggtagcgccccgaccggcgcaggagtcaccttatgactgctctcaattctcagcaacaggctgatgttgcccgctatatccgggaacatggcaataaaaccgttatttcccctgaatggtcacttatttatttctcgctgtgtcagtgtgaattacatcaatcgcatgaagccattatttttcataatggccgacctgcagggctatttattctgaatgaaacaggcgagctcaccgaattatatctgctggggtcgctttctgacattctcaccgccgctgcggtcaacaaatagctttcagggagtaaatacactatgaccatgcaatcagaacttgtttttactgatcctatgctcaacgtcgttattgctgaagttaagcgttttaattgcccgcttctttttgtcaaagatcatggcgtgtatgtgatggcggcgaaaggtgagaaaaacagtaatgggatgcacaatgtctgttacgccaatggttttaatccggatacaacggattttgacgagctctgggaccggatgcgtgatgcctgtggcggagatgatttttgcgaatccctggagctcgatccgaggtcgattgaacttctcagccgtaccaaaccctgcctgaaaattatgctttcagagacggaactggaagttattgcagggggacagaaatagaccataaaagcccgttaaatcgggcttttttatatttcactgtatttacatctaggacaaaatgtcctattatatatttgtggccgggcatggtgctcaggtcccctaacgagggaaatatatgaaattttcagcagaagaactcaacattatccgccaggcggacgccattattgccggtaaaattaccacaacggattttatcaccggcgccgacgccgcgcgttccttactgcggtttcgtcttgctgcagaaccacgcgaatcattctgcgcgttctttcttaactgccacaacggcgtgattgcgtttgaagaactgtttaagggaactatcagcagcgtcaccgttcatccgcgtatcgtcctgcaacgcgccctgcatcataatgccgccgccgtggtactggcgcataaccatccttccgctaacactacacccagccaggctgacaagctgatcaccgagcgtctggcgcaggtgctggggatggttgatgtcaaagtcctcgatcacctgattgtgggcggcagcgatatttactcttttgctgaacatggtctgatttgataaccgcggccgcacagtggtgcggccggctctggaggcttgctatgggcaataaatataccgtgccgcttaacgtgggcgcgatccgcgaaagctgtttccgtcccgctgataaatggaccccgccgacgggggatgaactccgctatctgctggaaaatgtgctcaacctgagtcaggagggactggcgcgacatgtcggcgtgaacggcagaacggtgcgccgctgggtgaacggagaaagtgacatcgcgtattccgtctggtgcgtcctttgcatcgatgccggcttaccgccgatctggaaatagcagcgcaaaacaccgacgcgcaaacgtgcttcctgaacgtatcggatatacgaaggaaatattatgaatactgataactattttttcagagtcccggccacacgcggaatacagggcggcatagaacaatacatgctgacggttcctatggtcgtgttacgtcgtattcttgcaatggacaatgatggcgatgttatggatcgcagccagcgagaagcgaacaaaacgcgggccaaaaaaatacggaattatgttgccggcgcaacatcaaaacgagctccctatattttgccgtcaattaccggaaatattgatagtcatgttgaattccttcccagcgaactctcgccggcagtggggattcttaaaattccgatggacgctgatttaaaattattcgatggccagcaccgtgcgctgggtatttttgaatttgtacgcgattattccaatacggaagatacgatcagcttgttgcttaccgttggcctgccacttgagttacgccagcagtttttcgctgatattaataacaacgcgagcaaaccggcagcggcgatcagtatggcatataacaacaatgatccggtcaaccagctggcaatgcatctggcccgaaccgtcaccgggctggcgggcacagtggattttgaacacaacgtggtcccggcgaaaagctcacggctgatcagctttaaagcactgaacgatgcgacgaaaaaaatgctcaacctgcgggccaacagcattccctcgacgcaacagcgtgatatggcagaaaagctctggactgcctgggcacaggcgatgcgctggaatgatattgcccaggatgatatcgctgcggagtaccgtcaggaggcgctgggactgcatggcatcatgataaatgcgatcggtatggcaacggccaggatgttacggcacagaacacctgaaagcatcgagaaccttctggcctgtgcggaaaacggagacaacggttttcattatcgggagtcgtttgtacctgagtgctgggaagggaagtgtgttgatccggagactggcaccattaaaactgaccggcgggcgcttgaagcaacggctgaagcgctgcaaaagctgatagacccgttcgcagatgcgctgtggttgcgtgcttatctgccagttgaagaggcgagtgatacggcattactgaaatatgctgctgacatcgagagttataagcagcgcacagccgtgccgatgatcaatatcgtggagaagctgaaggcgctgggtgacggcgaaccgcagttcagagcgtcggtgctggcttcccgtgaggggctaagccgctatctggccggggctgaaggctgacgcggtggttgccgcctgcagggcaatacgggcatcgaacccgtattgccctgaaacgcgctgagccgctctctgggcgcgcatttaaaaaacctgtacccatcatcgtttttatgtctttgacgagtcctgccccctattctggccttttctgatgtgatcccgccctggtgtctgcaagttaacttaattttgacgcccgcacagcgtgtcttccctgttcatttctgctcagttgccggcgttttctggctggcctgtcgtactaaaacacctctgggccccttcggctcctgcccgtcgggcagtcgtcagccacactccgctagccaggcaaagcctggcagctccgccgaaccccctgcggggtttcgggctatcgctagtgtctgatgcctgaacccctgcaccatgccggcaaagcaccttcatcgggctgatggggatctgaaaagcaaaatttacagggaaaggagttcaggaaaaaacaaagaaaattaatcagataacgcttgattgttatggctcattagacgtataatgatcacatcgaaaggcaataaggcttttcgcggtagcgccccgactggcgcaggagtaacaaattatgagtaaagcactgaccccctcccagcttaaagctgaactggaaacgcagaaagatgcgctgctgaaggcgtgcctgtatgccctcaacgaaatccctaaccgtcgtttaagtggcccgtatgcgtccacgtatgcgctggccgagcaggtcagtaaactgcttcagcgctgcaaataatcattgatgggctggcattgccagccctgttcaccccttacggtagcgccccgcatggcgcaggagtctgaaatgtcatctgaaaaaactctcccgtcggtcgatctgatgtcctgccagcatggcggtgaagtgatcccgtccatagctattgagcgcattatctcgttgcggaatgaaggtattcgcgtctatctcgacggcatagacaagctgcgaaaagcgcgcgatctgatgcagcaggccggaggctgtcagtacctgtatgactacgacaaagccgtagagagcgcgatcaaatggagcgacaccagaccagaccaggccgaaacggctatttcccgcgttatcgacggaaaaatctgggatcggctgatgtcggaaaccggcatgtatacgctgatgagcaacaaacaacgtcaggaatgggatcggcaggtggcaggcgaggaaatgccgccgataacgctggagaacgttatgagtacgttccggcacctgaacgcaagcaaggccgatactttcacgcaagggctgattgatatctttaaatccctgtcgtgggattataaaaccaataacccctgcatgtttggcaagcgtatcatcatcgcgccgttgctcgatgtctggcgcagtggctgggtgcgcttcagctcagacgggcacaccaaaattgacgatctggcgcggccgttctacgtgctggacgggcgtaacgtgcctgattaccgcgtttctgacggtgccaaactggatgcctttttcagtgaaaaccagttcaacggtaaggtgttcgagtgtgattacttcagcgtgcgatattacaaaaagggcagcgcgcacattacgtttaaacgcccggagctggttgagaagatcaataatctggttgccagtcactatcccggaatgttaccccctcgcgtgtaatgcagacggcaggccgcatttgcggcctgaaatataaacagggaaaggaagtattccccggcctgaaaaaatcatgccgggcatgtatttattgcttgattaatatggctcattagacgtataataatcacatcgaaaggcaatgaggcttttcgcggtagcgccccgactggcgcaggagtaataaatatggctattcaatcccttcagttccgtaacggctccgtttctcttggtgatgtttttgtttccagctggggttatgagcagacaaatacctgtttttatcaggtgatcgccctgcgcggtaagaaaaccgccgtactgcgccgcatcgctgcgcagcaggtgaaagcagacagtgcaatgtctggcgagttaaagccggtattgaacgactttaaaggcgaacccgtgacccgtcgcatctgtgaaaaccatgagcatccgtctgtcagcattgacgagtacgaacaggcttataagaccgatcctaacgaaagccatttttacagcacctggggctgaccgcctgctacgccccgcaaggggcgtatagtcgaagacttattcaaccaaaacgtgaatactatgcgaaataacaaggcgctcaggacgcagatacatggcggaaacagtttatcaggcgcggaggcgtttttaccttctccgttttcggcgcagtcgtaacccggacacactggaaaaaatgtacgaatccatgcgagatcgtggacaggtgccgccggaggacaccgaggcttttgaggctgccgccgaccatcgccgcgcagagctggcatcgggacgcatctgggataagatcccgccgcatgtctggcagtatgtaaaataatcacagcgcccctacacggggcgtttttttgcttgcatatatggctcattagacgtataatgtttttactgattcaaatcagtaccttcctaaacagccttacaggtgcattatgacctcttctgaaatcctccataacctccctcagattatcacggccgtggccgccctcattacagccattaccgggctgattaaagtcatgaaggataaaggtaaggactgaaccgccgcagggggcgacagccccctgcatccctaaccggcagcgccccgactggcgcaggagtaaaaaaagtgacaacgctgcatattcgagaaattcccactgatggagcgccgcctatctgtgcaggccgctcaatctcagatgatgacctttgcgcctcatgccagcatctcgactatcgccctgggcacctcagcgcctgcctgctgtcaggttgcgggcgtgacgactggccttcagaactggatgcaaacggcttcagcgttgcctgtagcagctatgagcgtgaaaaatcgcttgattaatatggctcattagacgtataattatcacatcgaaaggcatccggtctttcgcggcagcgccccgactggcgcaggagttttacaatgcacggtaacgtaaatgaaatttgcgcaaggcttctcgatagttttgatccacagcagcggatcagcctgctgatctggactgctgaagatgtccatgactgcaccagtgatatgaacctcactgacgatgaggccgaagccgttctggcagaaatcgcggaatgcagttcacacagccgttatggcgtcggaaaagataccgtctggagcctggcaaagcaggtgcgcgaagatgccgcccgcgatcgaaaaatagaggtcaatgccgaggcgctgcaaaaagtcgtggcgctggcggcgcagtttatccggctggaagaaatccagtctggtgaaggagctgcacgccgactttatccgcaggagtctgaggcgctggagtgcatcacgaaggtgattaacggctaattcacgcagtaacgcagcgaactttcacggtagcgccccgactggcgcaggaggaaaaaacatgtcccagaatgaagcctattacgacacgctggccctgattgaaaaggggcaatggtgtttcggcagtatggacgaagaaaacgaagagcgggcaatcaaggccgctaaggcgctggcgctgtttgcgcgcctgaatgagcaggactgcgacggacacccggtttccgaaatcatcgttgattttatcgctaacctgatgcacctgggggaagcgataaattttcgtgtgctcgatgaagaaagcgcggtgatcccgttggtcaggatcgccgccgtacactttaacgctgaaacaaagtcatagtaatcatgtgaatcagaagggggcaggcgtgatcctgcccccaaaaatggacaggggaaagagttctcccgcctgaaaatattcaggcaggcgggaattttttgcttgattaatatggctcattagacgtataataatcacatcgaaaggcaatccggtctttcgacggtagcgccccgactggcgcaggagtacagaaaatgtctactgaactgaatcaacccgccatcactgcacgcattatccccaataaccgccgcatggcctttctgccacgtctgttcggcgcctggtatctcacaggtgaggccggtgtctacaacctcgcacgctctctctgcgccgattatcaaggcggttcctgggagttcgtcgaactgtcttgcggtagcggcttcatgtacccactgagcgcagagcgcttcacggtatcggttagcggtaactggttcgaaggggaactgtccgcagaagctaccggtatcgtgctgaccctgttcaccctgaaccacatgatctggcacgcacatgatgaaggctatcagcacatctgcgacatgctgatcacccagcaggaaaagctcaaattatatgccgaccagcacgccgaagccggtttgatttaccgcgcgattgactgaaacggcggcccccgtgagggggccaatactgacagggggaaaaatgttaacactaactgatattcgcgccagcaatacggtgctggttacggaatttggcggcgtgcgtgctgtgcatttctgtctgcatgaaaaattaagcggtagcgacaacgatctgtggtttccgcttgccaatggagccgacctgttcgaggcgctggaaagcattatgtgcatcaattttgccgctgctaacgttgtctcgctggagttcctgcggcagaacgggaagtgcaaagactaccggatcacctacaacaaggccaaattcaagccattaggttagatgtctggcatcatttgatgttcatatttgaacaaaattaaataaaaaaaatacgtctgatgagttgataaaatggctcattagacgtataattattacatcgaaaggcagttgagtctttcgcggtagcgccccgactggcgaaggagttgaaatgaaagaagcagaccaaaaaaaagtgaatgccgtaatggcaattgctgattatctcggtgtgaaaaatcaaatcgaggtgatcgaatactcagccgaatcagtgcaggttgagtggcgaaatcctaaaacaaaacagcttattcatcgtgattacacttttgcaaattcctttgtaaaagactttgaaaaagccctgaaatcgaacgtgaagttttactgaaaaagagggggagaaatcccccttaatcctcccattttttactgataaacatcaaatatatgaggtgtattatgtggaaacgtggcgaaaacaaagtgattctgatggggcgtgctggcaaagatgcagaagtgcgttacaccccaaacggaacggccattgcgagcctgacgctggctacagaaatcagctacagcgacaacgaagggaaggagcaaaaagaaacggaatggcatgatattgtcatttttggaaagaaagccgaagcagctgggaagtacttcaaaaagggtatgatgctgtattttgtcgggcgcattcgtaataacaaatggcaagggacagacggcaaaatgcgcagcaataaggaaattgtgatcgataataacggcgaaatgcagatgctgccgggagctgggccacgtaacaccagtgcagaaggccagggaggcattgaaaatcatgatgaaccgccgttcccggatatgaatgattacccgcagtgagtatttgagttagaacggcccgcaggacgcgggccgccaatccagaggggggagtatgaatatcagtgaacaatatcgggtggcggtcgtcagtaccggccatgtaaaaaaagaagacgcggaactactggacaaggtctgtaacgatgacttgtccggtcaaggtttgttctggatcgagaaaaatcgctatgggtggatattgcgtatttctgctactgaacaatggcgagtggaattaaccagggcggggatcagtgcaagtgctttggataatatagccgcgttaaatggtgccgggttcgactggatttggtttgaccgggatgcggaacaggtgccagaactgaccgtttgggagtggtaaaccggttaaaaatttgcctcgaaaaggggcatttttttcttgcctgcaatggctcattagacgtataataatcgtgaagtttaaaagtggatattgattaaaacgctctgtaaataacgtggagagaatattatggcggccttatacccttatgaggtttatacccttattgtgtcagaattaatcgtaagccattttaatgatgtcgctatggtatatccgggaagcgaagaaattaaaaagaactacgacagtgaattaagtgctgtacaggtagttaatggcatcagagaaaaactgattgaagatggtgttatacagtgcgaacagtgcccactgctatccgagtgggatgagaacaaggttatcaaccagctaattaaagattaccgcctgattctcaatcgtgactatgaactaaaccgtgttcgtcagcagctggccccggagctgatcgcacagatagaaaactggaaagagcagaagtattccgattctgcgaaggaatacgaggtgctctatgaaaccatcaacatcaacggaaaggaggttacaggcaaactaaacgtagttgcagtaagtcgctttgatgctgttttcatcgtagggcagcgtcacgctaacgataactttttggttctggatgtgaaggaggtgatgaatcattgaaatccagaaaaggtgccggattgcgccaacaatccggctgggtaggcaatttaaattgtgaggttcaaaatgccattgtggattatacactatgctgaagatgtcgcaaacggagtgcaaacaaagtcgcatccgatgaacgcagcgcaatgggatcacttccgtttctggttggcagtgttccggcggattaaagaagccgcaatgtaatctgtaactgtctcaggggcgctgtatgcgcccctttttaatatccttgcccggactcctttccctgtaaatttatcgggatcaagggcggatcgtggccctgaacgtgcgcaccattgagcgctgcatcgcagcggaaccggaaaatttttttccggccaatgagtgcccttgtcaccggaacggtgacaagtatgcacgcacaattacacgaacaggcagcacccatgcccggcctgacaggccgggagctatatcataatgtgggatgctatatgtgaaaggtgaaggttaatactgcggacctgaagcgtcaggattctgagcggtagagctattttgtgtgcgctgctcttcgtcaactccagtgattttttttcggctgttgctggttcttttttttccaactcgtccggcagtaatgtccttgatatcacgtaatgtaacgtctgaaaaacccgcatcgttgaggaatttcagtatctctttatcttcatatcctttcgaatctttcagcttcttaatgtcagacttaagctcgtcgagtacgtgctttttctcaagcctttccgacgtcacatcaggcaagtcgtcgagaatgcttttgaattttccgatgtcctcactgctataaaatgctttcttttttgcaggcatatgccctcccaataatgtcaaaatcgccatgccgaaccggagaaaatcgacccaggctattcgggtgattttacatgatgcccggcacgattcaattgctctgcctgccaggcccttcgctgctggctttcaaacctcgccgatggtagaattcaatgaggtatttaagtacgggacaagatgtgtttttggagtaccgccgacacgcggcggccgtccaaaaacgtcttggtcagggcaagccccgacaccccctaacgaggttagctatctgatgagccgtagcgagagcagaaaaacagacgatcgaatccaggtgagatgttccacagaagtgaaagctaaactcaccgaaaaggcccatgaagcagggcttagtcttagtcaatatcttatcaaatctgggcttggaaagcgcattcaatcgaaaggcaattacaatgcacttgccgctcttgtaaagataacagcccttcaaaaacatctgtttaacgaaggtgccggagttcatagcaaggagtattcagagattctgatcgaggtcaaaaaggccgcacagaaactgcaacaggagatggatggtgatacctaaaatcattgagggccgaagggacaaaaagtccagctttggtcagctgattaagtacatggcagacaagccgtctcaggagttgactgatacagttcagcctactcctgagacggctttggctgttaaatcagatatgttcgaagggttaaacaattacctgacccgtaagcagaaagtgatcagcacaccggtggatgttgagccaggtgtacagcgtgttgtggttggtgatgttacctgccagtacaataccttctcgctcgatggtgcagcacaggaaatgaattcagtttctcagcaaagcacacgctgtaaagatccagttatgcactatgttctctcatggcctgactatgaaaagccgaatgatgatcaggttttcgattcggtgaagtttacactggcatcgatgggcatgtccgatcaccagtatgttgctgccatccaccgggatacagataacctgcatgtgcatgttgctgttaaccgcatcaatccccagacatataaagcagcctcatcgagctttaccaaagacactcttcatcaggcgtgccgcttactggaattgaagaatggttggtcccattcaaacggtgcatatgtggttaatgaccgtcaacagattgtccggaaccctcacagcaagaaagagcggggcaactggcgctcactcgatcgcatcaacaagatggagaataaagagggggttgaaacgctctatcgctatatcgttggtgatgaacaggtaggcggtagtcgtcaaaacttgatccatgtttcagctgggcttcgtgaagccaaaagctgggatgatgtgcataagacatttgcagacatcggtcttcgtgtcgaaaaagcacaggggaaaaagggctacgtcattacccacgaacatcaaaaccagaagacggctgttaaggcgagtctggtatttaacaaggcgcaatataccctgaagtcgatggaagagcgctttggtgaataccagccttcacatattgaaccggccaaagtatcggtatttaaaaccgcatatacccctggtgcttatcgtcgagatgccaataaacgtctgcagcgtaaaattgagcgcgcagaagaaagaatgctgctcaagggtcgctatcgcgcctaccgaaacaatttaccgatatattctccggataaggatcgcatcgccgatgaataccggaaaattgcccaacatacccggttggtgaaaaataacgtccggcattctgtttcagatcctcataccagaaagctgatgtacaacctggctgagttcaaacgcctgcaggcggttgccaatctgcggcttagcttgcgtgaagaacgcaacggtttcagagcggctaacccacggctttcttaccgggagtgggtcgaacaggaagcactgaagggtgataaggcagcgctcagccaaatgaggggctttgcctattcctccaggaagaaggagaagtataaacagcagctggttgagcagatcgggttcaaccgtacctttaacgccatcaccagtcatgatcgtgatgatgtggccgtaatggcctcagcacgtcatggtgtcaagccacggcttttgaaagacggtactgttatctttgagcgcgacggtaaaccggtagcggctgatcgtggtcatattgtgctgacagaaagtaatggaatcgacaaagagaaaacggctgatcttgcaattgcattaacgattgctggtaaagccaaatctgtacgtgttgatggtgacggcgagtttaaggaactgtgctgtaatcgtatcgtcgatgcagctgtgaaccacaatcaccctgtcgcgcagggcattaccttcacagatgccgctcagcaggcgtatgctcaaaacgagaaacatcgtttgattcgtgagcaaaataatagtaaaaatgaaatgcaattcagaagtgaaagcgacgacaaattcaatccgaagtaaaatggagtaagaaatgaaaatcaaaatgcaaacggtcctcgcggccgtttctgtgttagctcttgccgggtgtgcctctcaaagcgaaaaggaaaaacaaatctctgcacagcagctggtagatcaggaattgcgtgagcaagccattaagataaaactcgcacaggatgagctttaccaggctggagccattaacaggacccgttacaaattccctaccattatcaatgcaaacagtcagtatgttcgtgtgagctggcagggtgatgcttacgaattactggagcaactggctaaacagcgtggccttcaattcaccagtcaggggattaagttaccgcttccactcaatatcgatgttggtggttcgaaggttacgtttgaacagttgctgaccctgatccgacaacaaacgcagtaccgtgccaccatcaaccagaaacccggtgaactgcagctgctttacctcacaccatcgaagaaaggttcattcctcagagggacccgcccatgaaacttaaactgatcgtgcttctgacgttaccgctgcttgctgcgaacgttgcacgcgcggacgactccgatgttaaaggcctggattactacatggacccgccaagccaaagtgacgatgaggccgatgttactggcagtatgctaaacgacgcagcgcacaccattggatttcgcggcggtaaggcagaacgcgctaaagaaattcgcgccgcgctggaaaatcagcgcagcaaccttgattacatgtattcgttccagccgctgatctcttctgaaggctacctgcctccagtcattgctgaagctaaagacgttgcacacattaccaatgagcaaatccgaacggccaaccgtgcctatgacattgtggtgccggcgcgctttgtcagtaacccaccgacctggaaaagctatcttctgaccgggctgatggcgcagcggatcgaattgcctgaaccggcggcaatgccgaaggacgggaaacaacgtgatatctggaaaaaagctgtcgcgctgggctggtctgacggtcgccaaaaagctgatgagatattcactgctaatttcaatcgcctcacacgggattacaccggcatgttgcgctacagcacgctactgcagcagggcatgattaaggctccagtcatcacacagcagcagcaaacagttacaggggataaaaaccgcctcatgctgggcgataaaacgaaacgtatgaagcagcaagctgagtttgacatcaacaaacgcagctggaaaccgaccatacgttaaggggcagtagatggaagcattcaattttggtccaacgctgacgccccagacgctggaacgttttctcgtacactgctcaaacaatgaagtgtccgatattctgttgcagggcggagataaaatctgggtagaacgtcatgggcgccagttgcccatgacatcttacccgctcgacaacctggagctggaacgtaccgttgataaggtgttcggtcaggagatcaaagggacgctgaaaagtgctgcggtcgttaataccgctatccagctaagaggtgatgaagcgggcacgattggactcggccgcggcgaaacccgccggttccgcgcgaactttactcaggccgatatttataaaacagaagcggcaatgtctctgacactccgtgttctgaatgaggttattcctcagcttaaacaaatgggtattgagccggacctgtttaattctctgttgccggctgccggcctcggactgatatgcggcgagacgggatcgggcaagtcaaccctgatggccagcatcttccagtattgcggtgaaacgtaccaggaccggaaaatcatcacggttgaagatcccatcgagtatcgcctgggaagtcgagactggattgcgccggcgccggcacagtcacagattgggcgcgatattgattccttccacaattttatcactctctccgggctccgtcgttctccgaagattatgggggttggtgagctccttaaccgcctgtcatttgaagctgctgtactggcaggtaaatccggccacttttgtcttggcacactgcacgtcaaaacggtcggagaagccatttcccgatcattgcagaactatccgccggaaatgcgtgaagctgccgcctttgacctgctgagtatcctttcttacatcatcgtgcaacgcttgcttaaaacaaaagacggccggcgcaaggctgtccgtgaatatctcgtcattgataacagcctgcgccgcaaactctatgacgttgattacagcaagtggggccgctacatcgacgacctgttgatcgctgaaaaccgcagtctgattcagaacgcctgggcaatgcaccaggaaggtttgatcgacgaagcggaagtcatcgaggtcgcaggatatatggactatctggcgttaaaagagggcaagtatggacattaacaaatggcgttatgccggccggccactgacggtttttggtgtgcctgttatctcgtttcttgtgtacttcatctggtttccgttcccgtcagtaaaaacctttgttatctgcacctgtgtggttctcttttactttctgctggccatgatgggctacacgttaccggtgctgtaccaggtcattctccgggttatccgcgggaaaaaacttaccgggcggccgtggtggtaccggcgctctcagcgataacacataactacaggggtagacagtatggcgaaacctgaaattgcaactgaaagaacccgtctgagtattccctttgacgatcgccaacgtgcaatacgtgcggccggcaaactggctgatggcagtaatgctctggactacgtgaaggaagaaaaggtgtggtatgcacagccgggggccaacctgagccggctgaaagagtggatttttgaccccaataaagtgatcgaagaaccgcccctggatattcaggccattgaagatgaatttacggcgtggcttgaagagcgcggtgccattatcaaagaccccatagagttcgatggccagaagcattatgtcgataccgtggacggtaaagctggttcaagaaagggggtgtatgccgcctttctggatggccgacctgcagggtggtacagggactataagaacggtggtgaaattcagaaatgggtatctaccggcgcagcccctaaccctgaacaaatggccatgctccgtgctgatgctgcggcaaggcgtgaacaaagagctgcagcgcaagcggataagtttgatcagaccgctaaccggttgatggaagaatataaccggcttccggatgccacgggagatctggcatacctgaaaaacaaacaggtcattgccgctaacggccttaaagctgatgagcggggcaacgttgtgatccctctgtttaatgctgatggcgagttcaggacccttgagcgcatctggtccgacggtagtaaacaccttgaaaaagacggccaggcatgggggagttttttcgttgtgggtggtcaactgaaggatggtgacaacctgctttatgccgagggatatgcgacagcagccagtatcagcgaagccatcaatcagcctgtgatcatgacggttaatgccggcaacatggtggaagttgctggccgcctgaaagacacctttccaaacagcactcattacttccttgctgacaatgacatttataaagacgagaacgttgggctagaaaaagcgacagaagctgcagagctgactgccggccatgttctggtccctgcctttagcaacccgaaagaagggcttactgactacaacgatttgcatgtctctgaagggctggagcaagtcagattgcaggtagaaggagccattaatcaaatgaacagggtagacactatgccgactgataacccgaacattactgacgttaatcacagctcgactgacagcgctgccgttgcagatcctgaaaaagccgcgccggtggccagcgcccctgcagctgccgaaccggaggaaaccgcgccggtggccagcgcccctgcagctgctgaagcggtggaagccgcgccggtggccagcgcccctgcagctgatgaaccggtggaagtcgcgccggtggccagcgcccctgcagctgctgaaccggaggaaaccgcgccggtggccagcgcccctgcagctgctgaaccggaggaaaccgcgccggtggccagcgcccctgcagctgctgaaccggaatacaccgcaccaacagatcgagacggcgatgatgaagagagtaatagcgccagtgatcttgaggcgtatgccgctatgatggcctttggcggtgaaacaactgactccgctcagcaaaagcctgaaaggatagcgcccagcgaatctgtagctaataccgccccggctgaaaatgaaaccgaggagaagaaaaaaacaaacgaagaactggaaaacggcatacgctgggcaaccaacgataatgcagaaacgcccccaaaagaacgtatagacctggaagggttaattgcccggtttgggtacagagcagagaaagactatacggcgtatacgcttgatggacaggatgcgttttacgattacggctcacatctgcgtatggctacccctgaagccagccagagtgacgagatgatcctggcggccgttctaaccgcggataagcaacatcatcgtggtattgaaatcaccggcagtgacgaatttaaagagcgagtgtttaaccttatcagtgaatacaacattgaggtgaaactgactaacccagaacaaagggttaaattgctcgaactcaaaaaagcaaatgaaacagcaaaagaaacggcaaaagaaaatgttgctgattcaaatgcgaataagcaggaaggggcaaacgaaaagacaaattcatcagttcagcagaatggaatgcgctgggaagaatcggcctctgtgcagccgaagaagcagaatgcatctgatactcaaaaggaagataaagctgcaggtgaaccctgggagaaaggcgttatcgtcgcgcatggacgtgctaagtatgagtggaaagaagatgaatccatgaactactttgtcaccctcaaaaatgaacatggagagaagacactctgggggaaagaccttgagagagcggttaaagatgctggtgtagacacagaacgtcttgttacagtcagaaagctgggatttgtggatgttgaggtgaatgcacctgtccgtgatgaaagcaacaagatcgttcgttatgaaactatccagaccaaacgtaatgagtgggaagtaaagcctgtatacccacagccaacagcagggaatgaacaggcctataagccttctgaactggttccgtatgatgctgcaaccttccagaagctccgcacaacaattcagcagattaccggtgttgatctcagccgtgaggccgtgcctgaaaaagaactgtactggttcctgcctaatggtaagccagctccagaaagcatgacaaagcccacaggctataaactccctcaagagtcaaaaaccgcgggtacacctttgctgatcgcaccgcataaaaaaggcgaacgcccagattatttccttgttgagtcgcgtaaaggattcatgcaggggatcgcaaaggataaggagtccggtgagtaccatagcgtgattggaaaagtgaacaagcgtattgataaagacggaaactggaaaacgtatatgactctttcagcaatcaataaaaatgccgaaagtggaattgttttgcatggttatggacatgtagatcaggggggtaaaaatttgctttacaaaaacacaattgcaaatgaaaaacagcctcagcatttacaagcggcctcagatgaggtaaaaaacaaaacagtaatgaagcagctttttcatccttcaaatgctgcaaaaagaaaagatgatgaaaggagagaacagactcatgcaccagtcgcaaagtcagcgcctcggccataaaacaaaaaccctactcgttgcagtagggttttcctgcatttctgtgagctcatttgcggcaacacagacctgtgcagcatacgaactggcaaaagctggtgcagatgctgcctataagcaggaagtggaaaggattaacaacgccgcaaaaagcgaatccagtacgtctgattctctcggacagtgcctggggtcgctatcggtatcacttaaaatcccacagtttccgtctatcagcgacattattgataaggtgaaggatgaggtatgcaatacggttaaatcgaagattaatgagaagtgggggagcctgactaatacgacgctggacccgtggtcaacgatttcatcccgactgccagatacgtcaggtatcctgcccaacgcatcttctaaaaatgtgcaattaaacaatccggcagctgcgagtggaagtggtgaggatgcaaacagtgatgcattcccgttccatttgtaactaccggaagagtcctttcgggattttatcgaatagcttgccggttcgtatttcaacgcggcggtgttccgccgcggttagtaaacgcataaattctgtggcaggtagaacatcacgttttgagtctacatacgtatcaagcgaatcttcattcatgaaacgtctgacagtatgcagccagtcttcagctgatttcatattttttgagctcatcgtcgctcatctcggcaaacgctgcaggtcggcgaccttttcctgtccaggttatggactttccatcaacttcgatccggtacttcacttttccaaaagtggatttacttttcgtggacggaccaaagagattttcgaagatctggagagcttcatcagccgtaatattgtgttcttccatgaaccgctttgtggctgcggctttctcttcagtggccttctgttcttccttaaatttctcgatcattccctgtgcaatgtcggaccacatattaatgagttgttcaaggttttctggcgggattttgcgcaaaacggcggtggcttttcgtcgttcgcacatgataactgcacaggattcgtaatcattatgttcgctcatgtatacctcattgttcattaacgatctgcgtgattttctaacacaaacttttgaaaagagaaactctatgaaaacacaaaatggtgaaaatattatggatcaaactgactcggatcaaaactcagtcgttgatgatgacagcaacgcccttgctccagctctggctgaagagagtaaccgaacggtacaagaaatcgtatcgaaacatggtttaaaagtaattttgattcaaacgctaatcatattagtcgcaatcattatcattggtcttcagggttactggcttcaccagaaaaaaaccaaatatattgcaacgaatgggggcatgatcacagaagttcatccaaccgatgaacccgcttacacggcggaagaggtgatggactttgccaaccgtacaatgatcaaatcgctttcactgaactttgtgaattacgaaaaccaattaaccagcgtccgcggcgattttagcgctgaagggtacgttagtttccgtaaagcgctgtccgatagtgggctgctgaaagatatcagtgaaaaacgtctgaacgtaaaactttccacaactcctggaaccctgatcacggaaggtcttatccgtggcaccaaaacctatgcctggcaataccgcattccggtgactgttcagcttgttgggcaggctcaggactacagaccgcaaccttacgatttgatggttcaggtacgccgcgtaaaagaagacgaagatccacggggtattcaagtagcacaggccattctcaaaccccggaactactgaggtcaatcatgaagattaaactgttaactgtacttatggccgcactgttttcggcaaattctgtatctgcagctgatgcgccgactggtaatggagcgccgcagcaaacggcgccagctgtgcctggtggtgatattgctcaatggcagcaggccagttccgggttgcccgtaaatcagcagtcacaggtgcaacagcctccacagcaaacagcacaggaacaaggtcagcagcaggcgcaaggccaacaaccacaggcacaggcccaacagcagccaactactgcactgcctcctgcacccatgccgcagattcctccaccacagcagcaggttactcatgttaatccgcagacactggaagagttacctgcacctgttctgcagcagatccagcctattacccctggtcaggtgcggtctgcccgcagcgcaatggaagatatgagcgcggcggccaaaacctcaccattaacgccgatcccacgaatttcaagccagacggtatcactgtcagctggtgcatccattccgcaggtacgggtatttccaaaccaggcaaccacagtgacgttttcagatgcaaccggacacccttgggtattaggcgcccctccatataattcgagtccctgtgcatctggtggtgaactgtgtgttggctatattccagggtcggcggtattcacaatccagccgaccaatgcctatgccagcgggaacatcacagtgcttctgaaggggctggctacgccggtcattattaacgtgaagggggcagaaccctccgttaaatcaaaaaccgttgatgttgattatcgtctggatctccgtatcccgaagcgcagtcctgacacaccggtttataccgctactcctgagaaaaaaatctcactgtatgacaagcagctgcagagcgtgctcgatggcatcccgcctgaagatgctcagcggttgaaacttaaaaacgcgccagggagtaccaaagtctggcagatcggtgatgagctctacgtcagaagtaacatgcagctgcaggatgagtttgaaaaaacgctttccgctatcgatggcacacatgtttacgtgctgccggcaacaccagtgctgactttttcggttaacggtcaggcgcgtgacgttgaagttgagctgaattaaggggaacgacgatggctacagataaaggtaaagaaaccagaaaaatgatgctctacgtcggtggcgccgctgcagttgtggcgcttctgggagggtactggttgtttggctcatcagatgagccggcaacgggcgggtcgcaggtgaaggcccaggggctggaagggaaaactggcagggaaaaagctaatgatccccaatacaacaagctgctgaatgagtggaatgctgataactcagaaaaagcggctctcacgggggatagtttcatctccacgttgtcagccagtaacccggtggccgttgattacggcaccaaagcaccgccaccaaaatattcgtgggaatcgtcagcaaaacagtcgggcgataacagtaaggctaatgatgctgagcagaaagagcgtgagcgtcaggctaaagctgtggctacgttactgcagaaaatagaccaggccagaacaccggttgtcacgggtgttgctcttgcaacccctctgggagcagagggtaatgacaagaacggcggcaccttctcagggtggaccgattcggtctatccgcagaacaaaaagccggatgctgaaaaacaacagggggcgaagaataaggtcaaagataaaggagcccggcttgtatcggcttacacgcttgtgccggcagtaatggatacggcgatggacagtgacgatcagaacagtattgctattgcccatgttccaactggagcgcaggccggcgccaaattctattctggccaaaaccgtcttgccggcgatggtattcgaattcacttcaccggcatggagctgaacggagtgcagtgtaaggtcgatgcgtatggcgtggcttccgactcgttgcgcgcggccgtttcctcaaatgtaaataaccgctggttcagccgtattattctgccggctgttgctaacggattaggccgaactggtcagctgtatgcggacagcaattcgcagatgattatcactgacggcgggaatgcatatcgttcaactggtacacctgatggcaaagcggttgccggtaccattattggcgggatgggtgagcaagcagggcgtgtcctggccgacgatgcagcccgcctgccgattaagcaggttacggttgaccgtaaccaactcataggcatccagtttgtcgcgcctgtgtatgaaagcgactgtggcgagaatatggaaaatgcttctgcagagcaggtgcagcagcaagcaactcccacactatctagtgtgcaacctcagcagatgcctcagcctccggctcctaattaccctcagcaaaactttccaagctaccccggctacgggtatggcaccaataacccgtattaccgttaaggagattgataatgaatctgtttgaagatgacaataaaaacgaagcagctcctgcccaggaaccggtgtctgctaagcctgctgaaaagccaaaaccgacagtgacgccagcagcaaaagcgagcaaaaagccgcttaatatcagtgactatgcatggattggtggtatcgctgtcatcgctatcctgcttttagtctggttgtttgggggctccgatagtgatactgcgccagcgacggggaatggggcgatccagtcttcagcgcaacgtccgcgcgtacagtctgcccctgcagggcaggattctggtgacttccgcgagcagatttccgggattctgctgcagcaaaaggaacggctggacgcgatagaatcaacttctaaaaatggaatgatgatcctttccagtcagttacaaagcgctaatgaacaaattaaaaatctgaacaatcaggttcaggaactgaaaatgaaagccgctggttatgggccttcatttggtaatcagagtggaacaatttccggtgcaacgtcacaggcattacctttgttgagaggtttttcaattaatgatttatctggcgatcttgcttgggtaaaatacaaaaaccagacgtatgctgtgaaggtcggaagtcaacttggcggagtcaccattacgggtatcgatactgaaaatagaatcgttacaacaagtaaaggccttatccgctaatcaggacctaaaaaggcgaaactatggatttagaatcggtattaattcaggttgctaacggtggtcaggaaccgctgacaaggctaatcataggtgtcgctgcaatcgttgggatcattggtgttattggatatctgatgagcctgcggaagcaggccaggcattctaccaaaggtgttgaagttggcagaatttttgccgggatcatcttctgtgtatgcctcatcacgctgaaagcacagatgaactcaggcggtgccactttaggatttggcgatgtcagtttcggacccgtcagttatgcgagcgaatctacgtttggcatgggagccgcagcagtcaacgcagtgctggggattgttagaattctcggtgcatactttttttacaggggtattaaggggttgaaagactcttaccttgagggccatacggagctgtcagcttcgggcacgagaggggcatccattgtgaaaattgtatgtggactacttctgatgttcgatacacaaacgctcgatgcgttgcagagcacattaaacattcactggtaatcaaaaaggatactttatgaaaattgttaaatttatcaaagacaaggcgttatctgcatccatcgcagcgtatcagctgcgcggaacggtagcaaaatcgttagtggtattgccgctggcattgctgagcaaagaggctgcagctgaaacgactatctgggaaaagatcaataccttcacggaaggtatggccagtacccagcctggtctgattaccgctggtaaagtggttggtgttgtctgcttcatcgtaggtcttgttgctctgtggctcaaaaacaaacgcgggaaagatatcagtggcggcttcatcttctggtcaatggttgttggagcctgtctggtcggcctgaccgcatggatctcttctgttggttcaactgttggtgttgacgcaaccctgtaatgtcctttcggccccgccttgcggggccaataccggagttcccccatgaaagattttaagctcaccaggaatgaacaacctgccagatgccatgtgtgcgggataaagagcaaagatgttttctccctcgcagaagatggacagaaagagagaatgctttgctctgtatgcctgtcgctcgaacacccggagaaaatgaaactagagactcaaaccggacttctgctgaagagaaatacaaaccgaaaactctacagcctgttgtttcgttcaattgcaaaggcggaaaagtcaacggacgattcttaccgtgaaaaggcacagaaacttaaacagatattgctcagcacaactgacgtagttctaaacgaaaccggcagtgatgatggatacgatttactgcacctgataaaaaaacaccatcagttacttcccatgaattttgacgatgagtttgtcacttctgtcgcagagtcagacgaattgccggatgtaagtgactggaatgaaatttacaagggtaagagaggttttaaatgatttctttctttgaggatgtgatcgaaggtatctcacgcaatcttacgtcaaatgactcgttaaaatactgtgatttgacaacggttgtagggcttacgtcgcaggatcgcgttgagcatcctgaaatcagggctccgtacatactgaccacgaagaacaacgattttcttaccgttattgagattcagggcgctaaatcatcgtttgacgagaagtcgtttaatgacttcatcatgcacctttcaaactcgttgtcgaattcctttattaacagtggccataagctgtctgtggtgtttgagcgcgactttaccaagaaccaggaagagctgaataatgtttataaaccgcaggtagcagcaatagagcgcctgcagatagacattaaagacctgatcgccgatgacgcaaaaaaaatcgctgcccattacagccgtgaacgcgcttacatcgtgctgtatacctcgaaggggatgattgcgaaggatgaacttaaaaacgagcaggcaaaagctgccggcgttatgaaggatatcccgcagactcgcttcagtcagaacccaatcgaatttcagcttgaaggtttgaagatcacgcatgacgcgatgctttggcggctgattggtatgcttcagggggatgatgagtcggggatggggcttctggttgatgtcctcgatgtcaaacacgccggcgcaatgatgcgtcagatgctgttccggaactcaacatcagaaaactggtaccctcgcacgccgtttgaccaaaatctgcgagtctatggcgctccacggaaaggcaatatcgactcagtgctgccgccgcggctgaatatccagatcatggaaggggaactggaagaagatggtggcctgatttactgcgatggcaagtattacggttctgttgcccttgagttgccaccacttcaccctgtcaaatttaagcagttattcaacgcgattaaccggaaaatcccgtaccggataaaatatgactttatgggcgggggcaaaaaagcattgttctggccatcagtgatcgtctctttccttcgtttcattccctcactcggtactatcgcgcgtgatatggattatgtcggggcccagagcgaaaccgatccaacggctatcatggccatcaactttgccacctggggtgacactaaggatgaagccaaacgcaacctggcggctttaactaaggcgattgaaggctggggtgtatcaggtgtgtccaagacatatggcaatccaggtagcgcactgattgcatccgttccggggctgacgacggccacacctggctcattgcattatccgccgttgagtgaaggcttgcggatgttaccttttgaacgtccggccagtccctggcatggtaaaggcaatatcaacttcatcacgctcgatggcaagctgttcccctatcaaatcgccagtcccctgcaggagaaatttaccgatgtcatcaccggtgttccaggttccggtaaaagcgtgctggccaaccgccttaacctgagttcgatttaccgggctgataaaaaactgccttatctgactatcattgataagggctacagtgcaaaaggtatcgccgatctgattagcgctgagctgccgtcagagaaacgtcaccagattgccagtatcaccctgaacaatgacgaatcgcactgtattaacatctgcgatacgcagttaggttcaaggtatctgacgcagtttgaggaagtattcttaaagcagatgcttaacgcattctgtattgatccggcaattggccagccgccagatgcaatgagcgttggccaaatcgtcagtaaggttgtatcaaacgtatacaaagcaaaagcgcattcaagtgctaacttgtttaagtataacgacccggtgattaatgaagctctgaaagaatcaggtctggataaagagctcggtgaagactggtttgaaagagctacatggtgggaagtcgttgataagctgtttgccaaaaaatatcttcatgctgcgacggttgctcagcgttatgctgtgccaaccattcacgattttattgctgaactacaaactgaatcatttaaaaaccaatacgctgacgtaaaagttaatgggagtgagcctgtagtaggcttcgttgcacgttgcttccaggctgctgcagctgagtatgccattttctcagggataacggtttatgatttcagcccggagactcgcattgcgatcctggatatgcaaaacgtcctcggtgacagaacgacacctgcaggtaagctcaagtccggcattatgtatctttttgcgcgccagatggctgtgcgtaactactacctgcctcagtccgcagaaaccttcattcctgctttaccggagcagtacagggcatatcaccaggcgcgcatcagggagctttcagaagaggttaaacataccttttatgatgagtgtcataactttgccggcatcgactttattcaaaatgcgctgaacactgctgaccttgaagatcgtaaattcaacgtccgtactgccttctcgtctcagtatctgagccatatgccttcgagtgtgcttaaaaccatgaacagcctgtttatgatgcgcctgacggaaggggatgaagagtatctgaagcaattagagatcaacatcccggccgatatcctgcgtcgtttcagacagcttccgcaaggggtttatccggacggaagtggtactgcattcctcggtatttttaaaacaaaacgtggtcttatttgccacattctgaaaaacacattagggccaaaactgctttgggctttgaactcatctgcaaaagacagagcgctcagagatgtgctttatgaagagcttggaacgaaaaaagcaagggaagaattagcaaatagattccctatgggaagtgcatcaagtatcattgatgaaatggtggtcaatcagggtggtgagcgtgattctgaagaagaatcacaaactatggcgatgaagctcgctaaagaaatcatttctgatgtgagaaggggattcagatgataaaaatcggaaaagcaaaacggtcagtgatggccgtttcaattctggccttcagcgtacagtcagcatttgcctatacggtcaacgttaacagcagcattcccatctcaacgcaggttatgccggcgttgagcacagctaatggcctgttaggtaacatccaggccacgctgattaacattggtacggcaattagccagcagggcgatcgccaggcagcattaatgcagcaggtggccgaaactaaccgacagttcgaagtcgagcaaaaacgtaatgaccggctgctgcaggcacaggataagtaccgtgttccggatgatatttgtgcgcagtctattggcggtggcgccgcgggggtatcctcagcggccgctggcggtcagcgaacgctgggaagcgccagttctgcgaaagatgttaaggctatttttgaagtgccggcacgcgcaaccgacgtggacgcatcttcaacggccgaagttcacagccagtactgcgacagttcggattatgctgcatttggcgggacttcattttgcccaagtgtatctgacatgccgcgggcagatacgtcgctgagctcgttgctttatggcgccggcaaagaaggcaaggcacctgatctgacgtttacagatgagcagacagatgcggcgctgcgctatatgaaaaataccgcgttgcgcagtgctggtcgtcagctgagtcgtggggaagttaaaggcgccagcgggcgaatttacctgggcatgattcagcaataccaggcgctcaccgacgcggccgcacaacctcagatggaaatgatcgccaactccaaaccgaacccggccactgatgccgcgcttgcagatgcgcgcaaagtgccggaagtcgaatcctatttccaggcgacggccagtaacagggcgaaacagcttaaccgtatgtctgccagagagtttgaggaattcgaagtaggtcgccgttacagcaaccctgcttaccaggcgacgctgaccaacaagaacaccgaagatttgatgcgtgagcaaatcaatatcgccaatctgaacaactggttagtgctgaaaaccaaacagcagctggagaaacaaaatgtgctgcttggccagatcctggcgaacgacgcatatcaaacatacaaaccgatgctggcagcacagctggagagtgtgaacgcgggagtatccagaaaatgaccgacgaaaataaaacaggggataaagacacagccaaatcagggaaattaaaaaaaggccttgatgttgtaacaggtgtcaatgacctcccggaagggaaggctaaacgaacgatatattatattactggcatcagcgatatatattttattatcgcgtcagtaaagcaaacattcagcctgctctttcagcgggcttcattcgttaagaagcaaataaaaaaccttgatggtccacctgttgattctgatgcaaatcagccgttcgccgaagttatgaaacggagcaatagacctgtatcagaattgttggataaggccagtttatacaagaaatactggctttgttgtttttttgcattagtcctcattctgctttttttaacgtctggttatgccagattgcttctaaatggctcaccgaacatgagcttgttaagagcaactctcacctgtggcgtcctgtttgctgctgggatctttactttcattaaggctctcacatgtgagttcatggggtggcagttacgaaaccaggctcactctgatgcagagcaaggtacgttacgttatttccttaatgatgggggagtgcgtaatacatttaatttttcgcaggctggtcaagagcgggggccacatgagtaaattaaaaaggttgcttctatctcttttcgttgtggcgtcgccttcatattcagcggatttggggattgatggcataactgaagcggctaaacgttcaggtgacctatcgcgtcaaatgttacataccgtttttggtgaggtagttaataatccgtttagcccttccggcgatggcttgcttaataacgttttcttcactgtcaacgaagttatcgcgattcttgcccttgtctatatggggataatcagcattaagaaacttcaccaggcaggtcagttgggaagtttcattgagggtgatggcaataacgcattcaaaattgttaaaacgacttttgggtggttgttgcttgtacctaccgttgtcggttggtctgtggcgcagctgctttttctatggtgcggttcaatcattggcgtaggatctgccaatgttattgcagataaaacggcttcggaattagcgagtggtaaagctgtctatatagcccctgttatgccagaaatggcgtctgttgcaaaagggatgtttgaaacaaacctttgtgctttgggtgtaaatcaggggattgctcaaatggaggcttctggccaacattatgagaataacgccagaatgcaataccaaacaggtgacagcacatattctatatctgtaaacaacggctcagctgtatgtgggaccgtttcgctgccacaacgtccagcaggatggacttctatcttcgctagcggttatgcggattccgtctacagcgttcagcaacaagcaacggacacgttgtggggaaaaatgaagactgctgcagagcagtttaatgcagcatatatggcaaaaatgcgttccggggacggtgagctgccagatgttgaaagcgcgatccagactgctgcgcgtgattaccagcttcaggttcaacatgctgctaattcagcagccggtgacgacgaaattgttcaaaaaatggagtcggatatcaaagagaaagggtggctatatcttggtgtgtactatcacacattagctactgcgaataccgagatgaaagatgttgctaacctgaagccggtagtttcaggaatgagtaacgatggcgatatcggctctatcgattactttaaaggcttgttccaggcttaccattctcagctgaaaaatagtaattatacgccgcctcttggcaccgaatctaacgcacttgcaaggaacattgatcaaaaaagccttgaaaatgccgccacaactggagacggaacgtcccttattacaaaaattttcgacttcaacgttacaaactggcttgcaacgagtaactacggcactggtgatggttacagtgacgtgaccaaccctttactcaaaatgaaagctatcggcgattacacgttaggtgtagctgaggttggactcgccagttggaccgctatcaatgttgcagtgaaggtttcagaagggaagagtctacccggttttgctgcgggaatgatgaacaaacttacagggattcgagatgctattgctggcgtattagaatcggtttcgttcttggtttacccgctgttttatagcctctttggtatcggtcttgcgctatctatctggctgccgtttataccgatgatttattggtttgtagctatggcagattggctggttacgcttatgacaggtgtattggcgtcttccctgtgggcagctactcatatcaacattggccagagtaatgatgagcggagtacatatggttatgtgttccttatcgatgtaatgattcggccgatgctcatggtaatggggtttatttttgcttcactggccatcgtagctttgggaacggcgttaaacatgatgtttaaattcgctatggaacaggtccagtctgactctttcactggcctgctgtcatcgatcggatttttgatgttatatgcaaggctttgcacaggtatggtggctcgcgtatttgcacttcctgcgaggatgccgaactatgttataaactggattggacagaagatgaacgattcagtgttgggtgatatgcagaaccatgttcatgacatctttgctgcgttcggtcggggagccaaaaatatgaaccgtaacaaccctaagcaatttaatcctgacgcaggtgtagataagagcaaggacggcatcaaaggagcttaaatatgaatgcgttatcaaacactgactttaagaaaattagtaacaatgcgcgtcctaaaaggcttggatactatgcatcatggctctggatgatgtttgtattcctctttctgttcgttagcgctttcgtgtttctgagcggcttatactggacgattagagacggttcaattcaggagcactggtttagtacagtcggtatctttgtgatcgatgcagtgctgatctggatgttgaaaaaggacttcaggagccgcaagctctaccaggtaactgcttcaatgaagaactctggtttcttcgagcctcataaggactgcgagcactatgacctggcccggagaacttacatcggctttgacttcagtactggaatcataggagtagcatccctgtatgccacatccagtattaaacgtgaacggttattttttgaagccgaaacagtcgagtcatgggagtcagtcggcagggagttaatcataaacctgcgaaatacggggcttacgacgataacgatcacagctccaaatatcaataaagcgtacagggatatggaaatcatctgcagaacgcataaaaatagggatgaaaactatcagcatctgaagagtaaactgacagacgctggatggttcataaacagcaattattgagtttaacccgccgaatatggcgggttttttgtgtatactcaggtggttatagtcgtttgtagtcggagggcttgtgagcagagtagttgagcggcaggtgcataagagtaacctggataagcagaaggattacaggaatcgcatcagagatactcatgaccagctaaatctttatctgcccaaagatgcaaaaagaatgttgatagagatcacaaaagtaaaaaagctcactcaggcagaggttattgaatttcttgtgaaaagttattacgacggcttaaaatttgacgactctgaagagtgaggttactctgtaactgcgggatcgcaggtattgccccgctaagaaacgcatgatatgttaagcggcgtttacataaccttacggggttattacagaatttagcacgggaagagcggcccggagatgtaccgcttaggagtggcaggagccacaaaaagtaaaaccccctgatcctgacaggtactttggccggtctctttcaggaatcagggggtgcaaactgcccactggcagaaaggattatagcaaatgcgtaccctattgcaatacagcccggccaatatgtgcaggggctggtgaatcaaaagaatccatacctacagctttctgacattgagtcagtagaaggtctttcgccggagttcatctcctggcttgaaagccagtcccctaaagaatcgcccctgcagctgcttctcgatgaaggcaccaagcccgtgcgcaaaacccgccgtcgtcgcggtacgcactcaacggcgtgtctctgcccggagcccagctggtaccgaccggacaatttcaaaaagctccctggccagcttggccatgcctacaaccgccttgttcgccgcgatcgcaaaacgggcgcgttaagtctgcgtatgcggatcagccgccacccgtacttcgtgcagctgcgcgagcaggctggccggaagcgcgacttccgcccggagcgggagaaattactcgatgcgattgtgccgctcctggtcagcaccgttgaccgggctacccatatcgacactatcaacctcagtaaaatggcgtggcagctcagcgaaaaggacagcgaagggaacgtgatccggaaagtgacggtaccgcgggtttgccggctgctgcagcacatgatggaattcgggttactggcgctgcctgaaggcgtcacatgggacccgtttaaccgcaagtggttccccaagcatgtcgtgctgacggaacgcctctggaagatgatcggtgttgatctcgataagctgtatgcggagcaggccgaacaggtggccgctgaagctgcaggctggataacccgtgatgaacatggccaggcggaagaaatctctgttaaagccgcgcgccggcgctggtatgaaaaaatgatgcacgccacgctggttcgccggcgtgaagccgccctgaagggtaagcgcgagaagaagctgaaagcgctggcagaacagccctatgacgaccgggcttacgccatgtccgttcatctgatacggacgctgccgaaagacgaactgcacgcgctgtcgcctgagcagtttacccagcgagtacgcagccacctgtatcagctcgatctggggctggagagggaatccggtccccctgattatcactgattttctccccctgtaattctcttaccgccgcctggcggttttcgtgctggccagccggcgcgacctgctcaaatttcctccagttttaacgtgtggccatcgtgattttttgacgttctggcgccgccggtggataaccggcagcgagatcaccactatccacagttatccgcaaaggaggaaataaagtcacctgcaatcgtggtcaaagcaagctgcaatacactcttaacttctttaaaaagatgtttattcaataaagagatcactgttattcaggctcaattttctgtggattatgggaatatgcctggcctttcagcgccgctacgcggcacgacggccagaatggtcgctatgctcccaggttagcacccggcaaatgccgggcagggtggccagcagaaacctccaggccggattcttctttaccccaccgtgcttttccccgccgagccaacggctcggcagaaaaaagcatgatggatgatgtaactaataacacccccgtaagacggcagggctgcgacacgcacccctgacgtcaacgctactacccacgcgcccggtgtgccgcaaacgtcacaccgcccgctcgcagtagccagggggtaatgtggccacagcgtcacctgcagggcaggtctggcaggaaaatcgtctgctatggcgtgcaatgcctttcaggcaatcgacgccagtgtcagctgtgagttttaaaattaacagggaaaagaggatcgatttagccgcggttatccacgtcagccgctcgctggcgtgttaaacagggtgaagacaggggaatgttgctctttttgcagtgaaggccacagagagcgttttaggcgcttatttgaggaaatgcgatttctgccagaatggaggcacaaaaaaacccgactggtgagatcgggttttcatgttttgccccggatggaggcgggaacacctaaacaattgacggttaaatattacgccatgagtgcagtaaatgcaaaccaccctgaatagggtatactacgcgggtcaatctgttgacgttcttctccagcccccgcttacgcggcgtgaacggtttaaagccctggttgaaagacaggtggtgctgtttcaatgccctggctggagtgggaacatctaaacaattgacgtgaggtagccgctgtgacaggcaatgtaagggcgatcagcggtgttcctgctctgtatggagcaaacggatgattaacttgttaatcgtcgttctgcgggcagttgttgcagtgtctaacgctgtgatagcggtcctggagctgatccggcagtatttcgactgaccggaaacgtaactaaaggcggggggaccactccccgccttttaacagggttacatctcgatcatcgggaacagatcatcttcctggtggtaaagcacgtcgtccgtttccgttccatcaagccattcagcgaacagttcaaacaggcacaccgacatttcctccggtgaaattgcgccacactgcagctcgtagaagacctcaattttttccagcaggctgttggccgctttgtcgtagccgaacagcttgatcggcgggaagtgcattgcatccgggttagtttccgccagttcatcatccttgcgttccggatagatgctgtacagcgtcgccggcgatggcggtagtacctcgataaagcggtttatccgcatcggcagctcgctggaaaacttctcattgtccggaatgtaaaatgccgcgctgcgtaccagggcatcctgaaaagaaatcacaccctgaccttcggtctgcttacgcagctcacgaatgtttacgcgatccttttcacggatttggtacagatccccttcccggaccgttttggaaaacgtgccgtgttcggcttcctgcccggagagctcggaataataatcctggccgacggtttcgcgcagtatttcaaaggttttccggtcttcaatcgactcaaaatatttcacgcgggtgttggcgatcagcgaatccacctcgccgttcgcgccgcgtgcgagcgacgggtgatcctgggaggaaaatacgcccattttttccagtgaacgcatctgcgcactcagcgtatccataccgctggtgaaatactggcccagctcgtcataaatcagcccgtatggcgcctgattattcagcgcgtgagtgagcaggacttcctcttttttcccttcgagctggtagcccaggtccttactgatggtcattcgctgcagcgtcacatataaacggccaagcgtggccgcttcaccgcgtgacagctccagcgacgggatcatgacgatgagaatgcggtcattgtggaaaatatcgtccatccggatatcgccgctgtcttccggaaaaacatggccataagtttcattgaacagggagagtgtcttcaggaactgacggctcatgtagttatgctgttcgaaggcgcgggcttcccacgtttccgggtattccgcgttggccagcaggaagcctggtgtattttccagataactttccagcgcggcgtaaccctcgctgtgccagccgtttttctttgcctcaacgtacagcgcggccattgccggcagcgacatgtttttctgaatggtgcgctgtgacaaaagcagttcgccgcgggcacgcttataacacagggcattgatcagcgccgacatcatggcttttgccgtatcctgccactgtgccgaatccccgcccacctgggggagcatggattccatcaactggatgatgaaggtcggcggggcaacgctgaagaggttgactgagttggattgcgcgggaatgctttcctgcttcaccaggttcacgaacctgtcaatactgccggtcagcaggttgaggacgtaataatcatcctcacggccgaaacggcgcgccagcgaccaggtggcgaaggccagcttgttatctgctttaccgtctgagaggcagtagccacggcaccacagcagaaagttaacgataaacccatagaaggtttcggttttacccgacccggtggtaccaaaaaataccatgtggcgcagcaggtccgtcatgttcagccacagctcgcggccgaacaggcgtccccgctcatacccgacatataaaattcccttcgctttctttcgctcccggaccttatgcgggatgcgaatgggccccagacggtattccgcctgggtttccgtggtcagggtgtcgtcgaacatttcgcagtctttcggcattcgcagcggtggccggaatttgcgatccgtgaatgccaccatcagcggcggaaggatgaggatgctcagcagcatggtaaaggggagaaacaaacccagcacggtcagtatggccagtaggccaaactgtacgttcggagtgaggaaccactccatgaacgaaccatccgggcggatgacttttttactgtctacagattcctgttgcatagcggctccgggttattctcctattgcctgctgcaggcgggcatcgtctttgacgacggaaaccgggatcacatcacccgaatcggcaacgatggacggggtgccgataaacccgaatttcgcaaatgccatattgttcgcgtcaaccaggcgggcgccggtggtatccggggctgttttcggatcgtcaattttcgggttcatggtggtgtatcccatgttaatcgtgtcttcccagcttttcagtcgggtatctttcccggtatcgagtacaggagcggcgcggaccatcgagcgcaggtcgccataaacggacacggggaaaatctcgacgttatagcgtttgctcagttcctgcagtcggggttccagcgcgcggcagtgcgggcacatcggatcggaaaacacatacagggtgtgtttatgcccggttgaaagcgagatcgtaaagcgtccgctggtgacggcatctttcagtgacagcaagtcgttatcagccagttttttaggggcttcaggtgctgcctgaacctgcagctgctccggcgcagtggcaggctgctgcagacccggcgcgggagcatacgagtttgcctgcagtggctgtgccggttgatgcatattcatcaacgcgccgttgatggagacgataaagcccagcgcggcgactggccagaaaataaagttagacagccggcgcacggcattgagtccgcgctgctgtttcagctttttacggatattgttcagcgcctcgatggcctgatattcgttttcaaagcggaacagctgcaccgcttcaccagaaaacgtattgtgcgtcaggatgtgaccgctgccggcatcatggccaagcccaaaatgacaggctgacagggggaaggaatgcagggcttgttcctggtagtttccgtcagcggaaagataaagtgtgttgcgatcggtttttacggtgagtttcatacttcctcgcttagagttccaggtgatcgggacgggttgctggctgaggtttagccggcgtcggttcatcgtctgtcagtcgcagactgttgttcggggtgtcgtgcggagctgcaggcggcgtagccggctcgtcttccgcttcagcgtcagattcaaatgcaaatggcggtataacgtcttcctgccagtgagcgaccggaatggcgggatcgcggcggtcaatatggcggtaatggagcagatccagctcaaggcccagcacggccgcccgcacggtcggcgggaatttcgccgccttttcttcatcgagcgtcagccggtaactttcgcactgactccaggcaataacaccacctccctcaatgaagaacttcccgcggccggcgcttgaaagtgcataccataacgtgcggtccacacctttaagccaccggaaattagcggatggcagctgcaggtcatcatcgaacagcgcgtagagtagcgaacgggagctgcggcgcccctttgcaaattcccggaacgcttcacactggctggcgacggtccagaacccggcggccagcgaataatcagggaaaccgtctttagtccgcaggcaggaacggttgagatcgtcgagaatggatttagccgttggccggtcgcccataaaccgcagatgtacaaacgaggctgcgagcgctttttcccagggcgccagggaaagggccgccccttcgggcgccaggtttacctgtgacaggaagactttatgtgcggcttttttacggaggcggcgcttagcggtatcaatcaggttatgttcctgggcaaactcaacgggcgactgcgcgctgcgtgcttcttccggatcttcattcagcagcagctgatcgaggtggccaaaccgggcgaggatatgggctatccccggatagttttttaccatcacccagggcaggttccggatggtcagtttacgggtcagacgatagtaaggattgcgcgagataacccagacgaacaacccgatgattaaaatgaacaggggaaagagcacgctggccgtgtcgttcatcacgctgataaagtcccacagcgaaacctggtggttataccgcgccgccgacagcagcatgtcccggcgctcggccgcattacccggtgtaatggcgtccggcagtacaccgtagatccagtaaagcaggcgacagactccgtaaatcacataatcacgaaagccaaaccacatcactgtgatcatgatgagaagggccccgataatcatcaggccatcatcccctccccctttccgttgtggctggttttgcatcagaacctcagagaattttggtaaaccttcccgatataccaggccttacgcgccggcgtgttggagtgatagcggccgacaccctgccagaaatcccccccttcgagaatgatgttgtatttgaggatgtaggcactggccattgcagaggcgcagaagtcatgctgcagctgctccgcttttacgccaaaatcggacgccagcttattcgcccagatggtgtttatctggaatgcgccgtaatcgtaagtgccgtttttgtttttatttttcattcccggttttccgccttcagtcagccacaaggcgaggaatccacggagaggaatgtgataaatctgtgctgcttcaaccatgcaggttggcagcgggattgagggcggggcatcaaccataacaatctcctaatgatttctatttcgagtaaaaaatataccatcaataggagatttttttaaatcattttggtaaggataattgagaggctgtcagagggattttatttgccttcgacagagacaatattgccctcgttcgcattttcccatgtcgggatttcgccactcagcgtgcagcggagtgtttcttttccgacggtaagtggtgcgccactgctgtagtaatgactttcatacaggcaagaggttttcttttgttccggggtcagtgtaataccggcatcctgatcctttgccagcagttgtacaagatgttggtttgtctgtacctgctcacccagaatgctgctcagtaaagaatcggttttcggcgcggatacgctctgagcaaaggcactgcaactgattacggatgtagcaagaataagagcaatcttcgtgttgaatttcatttcactttctccattaaaaaaatcggcaatcattttctgtatcatttaaattaggtctgaaaaccggcctgagtgtcaagccgattctgtttaaaaattaacaggggataaaatgattcagtcacgtaataaatatctgcagtttatgctggttctgctggcagcctgggccatagcctggggggccatgtttgtcatggggcaggctgttctgctctatgggctggggaaaaatgtaatgttcttcagtggttgtgctgttctggtgtacctgctgtgtgttttcctggtttaccgccgctgggttgcaccgctaccggtcgttggtcaactgcgtaacgttggcgtaccgtggctggttggcgcgatggccgtggtgtatgtcggagaatttctgctgggtaaagtgctgaacctgcccgcagagccatttatgacggcgctttttgccgataaatccatacccgatgtgatcctgacgttgctggccgtttttatccttgccccgctgaatgaggaaatcctgttccgggggatcatgctgaacgtcttccgttcgcggtaccgctggacgatgtggctgggtgcgctgattacgtcgttgttgtttgccgccgcgcacagccagtatcagaatctgctgactctggcagaaatgttcctggtggggatgattacatctgctgcccggatcagaagcggcggcctgctgctgccggtattgctgcatatggaagctaccgtgctgggcttactgttgggctgaaagccaaccgacagtgacgccagcagcaaaagagaacaaaaaggctgcccctgccggcatactgcgtgccggcattgcctgtttcctgaagcctgcaatatactgtatgtataaacagttgttggaggctaaattatggcgctggatctcgtttatccccggccttcagtggaaggcgccgcacttcctttttttgccgaacccgtttcggccggctttcccagcccggcagcaggctatgaggccaatgagcttaacctgcatgattactgtgtgcggcgtccggccgcgacgtacttcttgcgtgtgtccggcgattccatgcgtgatgcgcgcattcatgatggcgatgtgctggtcgtcgatcgggcagaagaaccccggcacggcagcatcgtgattgccagcatcgataatgaatttacggtcaagcagctgcagctccgcccttacccctgcctgatgccgctgaatccggcttttccgccaatcaggtttgatccggaggcgctgcagatatggggtgtggttacgttcactgtcatgagacaccgcccgtgtacgccttaatcgacgtcaattcgatgtactgcagctgcgaagaggccttccgccctgatttacgaggtcgcccggttgtcgttctcagcaacaacgacggggcgcttgttgcggtcaatcgcgcggcgaaagcgctgggcgtgcgccgcggggagccttatttccgctgtcgccgcctgctggaacagcataacgttgctgtattcagttccaactacaccctttacgcctcattttccgccagatttgcaaccgtggtggaaagtctggcgccgcggacatttgtttactcaattgatgagctctttgcggatgcctctcatatggagggagtgatgacgccgcaggcgtttggccagcttttgcgggctgaagtgctgcgccagacaacgctcacctgtggagtcggcgtcgcaccaacgaagacgctggccaagctgtgtaaccacgccgcaaagacgtggcctgccaccggcggggttgtggcgctcagtgatcctgcgcgactgaaaaagctgatgagcctggtggcggccggcgatgtgtggggcgttggccatcgtaccgaaaaagggctggcggcaatggggatcaaaacggcgctggcgctcgcagagatggatatccgtcttgcacgccggctgtacggtgtgacgctggagcggaccattcgtgagctgcgtggcgaggcctgttttgccctggaggaaggaaccggcgcgaaacagcagcttgttgtatcccgttcgtttggagcacgggtcacgcaactggcgcagatgcagcaggcggtgactaaatatgccacacgggcaggggaaaagttgcgtcaggaaaaccgcctggcgaaggtggtaacggtctttatccgcagcagtgcttatgacgccggcggtgtaccctacagtaaccaggctacggaagtgcttcccgtgccaagccaggatacacgcgacatcatcgccgcggcgcagctggggctgtcgcgtatctggcgtgagggcgtgcggtatgcaaaagccggcgtgatgctcagcgatctgcagggatatgaaacccagctggatctgttttcgccggctgcagtgcggccgggcagcgaaaaactgatggccaccatcgacaaaataaacagggaaggaaggtcaaggatcttcttcgccggagaaggtattgatccggaatatgccatgcgccgtgaaatgttgtccccggcctacaccacgcagtggaaggatattcccgcggcgtttatgcgataacagcgatgtgcaggccagtctgtcaggcctgcagccgttcctgctcctgcagcaatgccagatggtatgcggcaatggcgttcaccaccccggccgtcatccgtgcatcggctatcggcgagtgtgcctccccttcccaggtcaatgctgcctgactggccgcgctggccagcgaaatggtgccatagcgattggtggccccaaaataccctgctgccagctccatcgcgcaatacactgtcagttctcccagccagtcggccggatcgccatgtgcggcggccgtctgtttcagaatgcgggtatcaaagggggcgttaaagataatcactggccgggccccgatggcgtggcgcagctgcagcgccacatctggccaggatggtgcgccgctgagtgccggctcatcgataccatgcacggcggcggcctgcgcctcgatggcgaccgtcggcttcaggcgtgtttcaaatatcacccggccggccgcatcggtcaggccgatttccagcgcttccgcggtattacccagccccgtcgtttcggtatccagaaagagcggcgcctgactcagccagtcgtgtgcccgctgtgccatccggccactggtgctgttaagccgggacaggacggaaagacgcaggccggcctgctgctgcttctcagtcggcggccgtttttcccgcatcggaacacagtctgcaatgcggtatacggcgtacttgccgccataggcgcttttgtaccatttcaccggctcagcaccgggagccggcttcattctgaattcatcgcgcaggcgccctttcgtgaagcaccgatcgccggctatcgcctcagcgcgtcgtgtggccagctcatcattcttcatggttattccatctccgtcaggcgtttgtgataaacctctctggcgatctccaggcctgcctctgtcagcccaaacgcgagcgtcagtgactgattatcccggtatttgctgagcaggccgtggcggttcagcgtatggcaggagcgacgaaaattggtatcggcaacgggctggaggcgtcccttattgaggatgctgaaaagctgcatcgccgggaacgggcctgccagctgacgttctgccagaccatacagaacaaacaatacgtctttttgcacaccggagagccgcatcgagggggctttactttgcatgttattcatgtgtcacatcattaaggaattaatgacaaagtaacctaattgatgtgagacatcaatagcattgtgtttttaacgggatatcaggagtccgaaaaagaaaatgccgctcttgacggcggcttattttccctggtgtcgggagaattatggtttctggcttaggtcaaggcgcagggcgttgtctgtgagcagatccagtgccgccgtcagatgctgactccgcccgccgtgataatccggccacggaagaaagggttttgacgcatcagacatgaacatgataccggtcgggcagcgccactccgtgggggttcctttgttgtaatgaaccagcagtaccgaacggtcgcactgcacgtcattactgtcatcgttattcagcacaaaagtggccacgatgccggcatcgggcctggacacgaaaagcaggctgttggcaaaaataacggcaatcaccactgaggcaatggccgcaccggtataccagaaacggccgtttttccaggcacgatagccatacaagatgcacagcagaatggcggcggcgatacctgcccactgcgcaccaacggacagcctggagagtgcatccatcgaaacaggccggctcagcgtataaaatgtggcaaagaaaggtgatgccagcgccagcgttaacagaactaaggcgagcggtatgaagcggttgccggcgaaactgccattgccgatcgccgtcatcgtgcggaacatctcacttagcgccaggatcatcataaaactgcataaagccatgtataacattaaaacctctccttactgcccgcgtgatagggtcgtatttccggctaattccagatagtcccggcccttatcgtggtgcatagccctcttcagccagtgctttcatgatctggttgattccatccatcatcagatatgcctcaatatctgacgtcgccaggccgcggcagtcactgaatcccagacgcttaaccagttgcgccagagcctgcgcttctctgtgtgtcagctgtatattcacttcaacgggtttttcgtggcgaatttcatctttcatggtcagagtccttttttgatgtttcgtgaaatgtaccaggcttcttttgcctgagctacagcccagatccagacgagagttgacacaatgcacagccccgtcatgttccagaaatgacctgtcgtatattcatggccatgaagcaggaggccggcgccggccgccaggctcatgaccaggaaaaggacagctgcgccggcgtgataaatgatgctgaacatgtaaaacccccttctggcgacggtagcgccagtctctgtctgtattaaatggttgccgcctgccgggcgtctgcctgcatcatggcgtcaatcagggcgccggcgcaggcaatattcaggcacgtcatgttcgatttcagggtcgccatcatgtccgcgcggcttcttttcagaaacggctgcagcggaccacgatagccctgtgaggtcacgataatcagctgagcggccgcatcatgcagtgccggcacgccggccagaatatcctgctcagccgcgctgatatacacgggtgaaccggcgatcacaaagcgatcgtccgggcagcgttgcatcagctcagccagggaggcgcagcggcccgccagcggggggcgtgccgtcagtgagccccagacggtcgccggcgcgaagggcatggcgtgaaacgttgcctcatacgcgaccgccggatcggtatggtggcgcagccccagaccggccgacatggcccacagctcgatgcccggccaccgcgccgcgataccgcgggcacgcagccagtgtgcgccccggtaaagctctcccgtttccagcaccctgccaggacggcgggcggcctgggcgatcagcctgtaccagccgtcaaaggcgtcatcaagggaagtgtcgcccggaaaaacggtatcttccacgctgcccgccttgcgccgggtacaggtggtgatgaggtgaagacgtctgttcattcagggcctcccggctcggctctgtcgcattaagaagtcgtcagataacatgctgtttttttttgcgatgttgtagtgttttaatttctatggtgtcgccatcgagaacgcgaataactttcccctgaagaattttctggttaaatgtataaggtattccacctgcatttgcagactgaaaagcggtaagcagataaataaatattgttaataagattttcataaaagattaacgttaatttgtctgtacaatggatagagcgttattcttattttcttcctgccgcttcatcgaaaaatgatgattttcctactgctgcggcatcatactgaaatgaatatccaaaatcatcgtcatgctcaaaacctgtattttctccattttttagtctggaaagaataatctcaagttgactgattatatcttccctttcactatgacgagtgccttgtaagagaatagttacttgttgcaaaggatatgcatgttcaatccatgcctggctaggtccagagtgcgttgtatataaatttttttgtgccgaaatattattcagaaaacaggctaaatcatcattgggataaatttctttaatattgttaatgtcggatgttagttttacaagttggaatggtggagaatttttgtcttcattgttgtctcctttatcgtattctggaaacacaattaacaaaggtgcaccattagttctcttcataaagcgggttactagccgcccaatatatttattggacatatgctgttcaatgtccaggacagcatattcctccgctgggaacattttgtttttttcgatggatttaatttttctggtaagatgaatgtttctgataagcaaacctactatcaggaagtaaataaatatccagaataaaaaatcactctgtagttgttctatcataagtgaatcctctaatttgttaatggacaaatcattacccgttcatcaatgtttgtaggaagttcgccaggagtagggacgcgttctcctcgctgggcggcttgtgccagtgttcgtagcagcaacacgctggcatgaaatatggcctgttcttttgtggctgcgcttgtttccaggtcgaaatcactcagagttacaacgacttgcccgtttctgttctcgaccgttgccgggtagggaacaaaatagggagcgatcttgctggtttgcttgcgtcgggcatcgagtttactgacaagttgataagcccgaaggtgtgtgtatcgtttcaacatgttcagggagcgatggcctgaaatagcggcaacttcaatgacattcaatgtaccaagttcgaaaaatcggctgatagcctcatgacggaggtcatgaaaatgcaagttttctatcttcagttcctgaagtgctgttcgccaggcacttttgaaccccgaagatgtataagaaaaaatattaccgttaagctgtattggcagcatttgcaggtaactacgggctttcctggatagcggaacatcgcgtggagcaccatttttggttgttggaagatgagctaccccatgttgcagatcgacgtgttcccaacgcaatgacaagatttcaccttgtcgcattgctgtttccagcgccagatgaaaaatgacgtaaagagcctggtttttttctttgaaataccgcgaaagtcggcgttcttctcctgaagtcaggcgacgatcgcgcccgctactgattttgggttttctgaccagttcgacaggattcatgcggcatgttccccattccacacgggcgatattgaataatgatgacaacagggcaagttcaagacggacggtgtttccggttatttgacgccccgttcgggggttaatttgcgccaaccgttgatcccgataattggcaatatcaacagtggtaatgtcatccatatagcgttcagcaatagggtgacgtttaatcacatttacgcgataaaactcctgtagatgaccttttttgtggatggatactgtcttcaggtatttgtccagcgcccggctgattgtcattttgcgaattttgattttctgaaacatatcccctccagacaaaaaaggggggaaggtagagattcttgcttcgaaatgcaatatcaccgtgccaatccggtacgtggagaagggcatcaggtagcactgttctgacaggaaaaatagcaaatggacaacagatcccattgccatctggtttttctgccagccagtgtacctggagtgtcagtaatgcagaaaatccgcacgggtggaagccgaattattttgcggggtcagttgcaacctatgatgccaatcgaattgtgaaatgcggcttctatgacgaatacaacttttatggcggtactcaccgaactgacctgtcggggaaatgtagttacatcgtggtttgccagtgataagtatcgtcactggcaaatggcgtaaactgtaatggaaccattttgatcttcggtcgtgtcgcaactggcagtccatgcattgttgcctgaaggcatggaacgcgtgagccatataaatccggtatttgatctgcattgaccgcctccaccaatgactttcttgccagatggacatgttgccgttgctcctggccaacgccacgcagtagctgaagcggtaacaatttggctatcacctgcgccaatttttttccacgtaccggattggcacggaggccagtgccaatccggtgtgtggagaacttccggttcctctaacggtagttacagtaatcttggctcacacagaggatcatttactggtcgcaatacaggaagtggtacgctgtttgtttacgcctctggagggaatggtggttccgccgggggagattgcgctaacacatccagattgcagggatacgttgcaggggtattgattagcacaaatgcgagcaacaacccatcttatgggaagacagcattcatctcttttgctgtccctgctggcgcaacttatcagatcacctcttatccggcccaaaactactcttgtggctcaggggtattttcagtttttggataccaaacttaattgagagttacacaggacgcaatacaacctgtcttgtgctcgtatttgtaccattttcgtgaaccagatggactctcgactacctggcagtaatgagaatcctcagcatttcccattctggcaatggcacaaaagtcaaattgccccaagtaaccagtgctggaaagttgagtaaccttgagctttccacctaatgccctccacacaccggattggcacgaaagtatcgcccctgtactgtcgcggcctacaagcccgttaggggagcaggaagcgccagccgttgctgttttttcaagctgtaaatactcgcctgtatagaggcgtccatcagcgcgtacagttccaccttttacctggccgccagtataaatccctttattattcacgctgcgcaaccaggacgaatcggacatataccagccgccaccataggtactgttcatccagcctttgctgttttttgtgaccagccagccattattcgaagtgatatcgccgttggttgtggctgtatttcctgaaattgcgccagagaacgtaccgttacgtgcgctgatatcgccggagagcgcggcggcgttgccgtttaaagtgccgacgttgttcagattgttgctgttcatatcaatcgccgtatgcatcctgttaaggtcgggacgattggttatggagtaacgatacaaacggtcgctttcctgcaaatcagcgccaacaagtgccattgcaatatgcccggtcgcgcagttcagcccgtaatttgaaggcgtgtcagaccagccgccacccgcgccaatcgcctgcttgctgctgttgatgtagccgccaagcccttcaatcatgcttgctaccgagcgcattccggcttctgacagggactgaccgccattactacaggtcagggcttccagacgggatgttttgctgttctttgcaataccggtaatgtagctttgtccaaaattggattcagaaaaaccagatttcagatagcctttctgaatgagtgttgctggcgtgattgttttgggtaaagagccagcaagtagtgttgatgcattgtcagcaacataattacgaacagcggtgttataggtatttgcgtgttctgctgcattctgccagcgaacattattcagatggttttcaatgttttcataaactttagggataaccatcaccattatgccgatgacaagtaatacctcaagaagagatacacctttatctgtctttttcattgctcttaatcctcagaataatattcccggtacgagtgagtaaacaaacattccgccacaaaggaacggaccgaatgggatatattttttttgcttgtttaatccgccaagagtgaagaaaataattccgccgataacggcaataaatacaattgaacaggcaatctcaggcgttggaaaccatacgccagttcctgcaataagtagcacatctcccatgccgaaactttccgttccgtttttatatgcaaagtaaagtcttacaaacagcataatgaagaacatcagcattgcacaaaacaaaccagacaatatattgttattccatgtctgatataacaggccagagaagataaatgtcacggtataaaggcgtggtagtagaaatgaaagaaggtctatacaagccattaatgtaaggaaggcatagaaaacaatcactattatagattgaatcagtgatagctggtttaatgaaagatacagaacggcaagcgttgtcagtatcagacagtaatatttctctgtgccggttttataagatacattaagtttatttaaacggaattttacttcattgtaggcgtagcattgacagacgatatttgcacagcaaagtatcgccgtattaaatatgctgtttagcataagttaccttaccatgtatttattgtagacatagcgtgcgtatttgattcttttctgttcgttactttctttgaaaccagcgttataactgccaagacaactccagtttatgccacatttctgaaaatgtgttgccagaatccacgcgccaatttgtatattgagacaggggttatcaataagctctgatttgtcttttattacgccaagttttttcaggttggggatgtgtgatgaattaatttgcatcagtccgtaatcggtgcttaatatttttcctttttctttgttgtgatttatccggtctggtatgagtgaactttctacagtggcaatgcttttcagaagcaggggatcaatcagataacgttgcccggcttgtgcaaagcaggcatcaaattgggtcgttgtcgctgaatatgcgggttgcaatgaaaagattaatgatgaaatacatgatagcaggatataaagaacagaacgcacaatactcctcctgtaaacatggaaaaaataagcgcccgaaggcgcttatccgatgcacatgaaaaatcaggaatcagtgctgaaggtcagcgtattgctgtcagatgagcaaacagttgccgcatcgacagttgatgtggaagtgttgttaatcttggagattgcgctggaagaacgcagggcgtttaccattgccatgcagtttttcttcggtacgctggcctcaacaacattgaaggagtatttatccgaagaggttgtgattgtaacggagccgccccacgggtttttcgcgcttgcgccagttgtatctgcgatcatatcggatggcagtaatccttgcgcgtagagagtcttaatatagttactgtcagtataacgcccctggaatttcagtgatttcatgttggcaatcactgtcaggacattgttttgttcattggatgattgaatgttggattgcaccattgaatagagtttatatgcacttgctgcaagtacaacaataacaccaacaaccaataacacttccatcagtgttgcccctttgtcctgttcttttttacggcgtgcagaaagagaagaaaaaacagaacgcatatttaaaatattaatagaagacataataaataattccttatttattgagaggttaaaaatattagggattagtgttgcaggacgttactgacatcgtagagagcagtaatcatcattacaataaatgcgaaaacaattaacgcggatactacagttatccagactcctgttgatttgacttttccttttgcttcctccagccatttatcagcatagttagacatcatcaatgcattgtcagcattttcagaatgaagtaatagtttgttaatgcataatttcgatgggaagtcataaccgcaacttttcattgccattgcaagtgactgtccaagtaaaacatatctcctgatttcttttattcgttcgagtagccatctgttttgagtgctgtttttctccagcctttccagtgcttttgcaacgggaatatcaatacttaacatggaggccatgttgaagagaaaacttacaccattaaatgttttataaagtgaccaggggggaatgtaatcaagatactgacggcccggtcctgtataacgcgcaagcgaatatctgatcaggaaaaacagtacgatgcagaagcagagaatatacgttccgttttctatcaggaaaccagacgtatctgtcagtaatcgcatagaacttgtccagcgttctttcggtgcgagagaaaggaaaacaggtgttatggtatcgtggaccatatacatgtttgccagacaaccaaaaaccagtacggatggataaatcatcgacataacaagagtcattgtcatttcagaacgacttctgacaatttttatggcctgaactaaccctcccgcaaggtcgccgcgaatttcaccgctggatattagttgatattcatcctcctttatatatttttttaatgctgaagatattgcccctgtgttattcagtgcattaaggcactcacaacaaatatagtaggttgcagaagaccccgttttttttccgtagtctgtttctacatcaatcaggtgtgtaagagcacgctttacatttatgccatcatttaacattccagataaatcttcatataaacttattctggaatacctgaatgtgtattttgccagccagtgggatattccagagaaatcaatttctatcgaattgagtttctcaaatatatcttttatcgccatgtcccctccgggagcattgagtatttatcttcgtcaatgggggatatgaagtgtgcggacagcggatctaccaggccatgattaatcaggtgtaataagtgctgattacgggtaattcctccaagttcatagtgccagtatgattttgcttccagacgcccggactgacgatacaactgaaaaaaacgtgcgtcgggtgagacgacttctgctataaccgtccttcccgttacgcctttataacagtgctcacaaccgtcaagattgcgcaaccggacctgttccggcaggcaattttcctcaatgagtttccgttcttctgtactcagtttgtctgccatttcagcataagtgcgcttacagtaaggacagagtttttgtaccagccgttgactcagcagaccgataaacagaagaggatctgcaatcagcctggcctgaatattctccatttcaaggcgctcaataatattcagggcatcgttggcgtgtaaggtcgtcaacagaaggtggcctgtcatcgaggctttgattgctgctaatgccgatgcgtgatcacgaatttcgccgttcagtatcgcgtctggatcaagtcgcatagcggatttaatcgcgtcaacccagccatcgacggaatccctgactgccgtctgtattgcgccgggaatgcggccctccggcggtgattcaatggtgaaaaggcgttttcgggggagacgcatattatcgttatggttgaaaccaaacgtgctcagataggcttctgaagccgttctcagagtcgttgacttaccggaccctgtagggccggataaaacgataattccttccgggcgttgtaacattcgcctgattgtctggatttgttgtggcatgtagccaagttcttcgaaagtgggaatatcctcgctgtcatctttaatcaggcggaataccgcgtacacaccacccacgcacggataatgcgaatagcgcgccccaaaaagatttacaggcttcagaaaattctctgcgatacgtgcatcctgcggtattgctgggtcaaactgcgtacctttgataacatcgctcattccagaataggcagcacccagcaattccagcccttctttacgcgggatgacatccagaatttccagttccccatgcacgcgtgcttcgacataagtgaactcggaaccgtcccgaccaggtgtgatgtgcaaatcggaacttcccaggttgtttgctttcgccaggtagctaatgaccttttcctggttgctgtttaagtgttgtgatgagtttgaatcagaccttctttcgctgtcctggtagcgggatgcgataacatcaagagtggtccaggttatatttacctttccgggatatttaacattcagagtgccaatataagcctgaacagcacgctgtcctttactgttatcagcgatataaacatgaacaggtttatcgtctttttcagatatactgacgtatacaacatcagaaatatcttttcctggatagtctgcgtcagaaaaaaacattatgtgtcgtctctttcaatagcattaaagaataagctggcgtttctctgtaccattctgaatccagacgccattaccagtgattgatgccaccttataagaagtacctggaatactttgcccgaccttgacatcagttactgacccgtccaggagagaaattcgtgctgacatttgttgtggtgtaccaaatatttcaataacacgaagtgatttagcggctacacgttgcgctggtatatcggtatctgcaagagaagaatacccggaagagggcgttattgctggcgttgcggacgctacaccattcaaatcaagattacgcaattcactgacagccttctgacgcgccagctttgcttcgtaaattaccgtttcagcctgaatctgctctacctgtaaaatggtcggagatgaatattttatttcgtcttttggtgtgctttcagattctgttgcgtaagcaagtgaactgaaaaaacagacagaaataatcgttggtttaattatttttaacatagaatgcacctttaatctcataattcagtcttccttcttccagttttattcctgcatactggaagcgaacggcaggttcatgaaagttagcgaaaagtattgaaggcggggtgctggtctgaatcattaattcatactcgttccacgggagaattattggacggccttcttcatctgtttttgtgttttcaatttcctgccaggtgagttttaacctcattttttgtgcaaatgttgtcaggcgttcctgaatatctgttgcctgtggcaatgtgtccggggtaattggatcaggcgaaacgtcaaaactgacaggaagagaaaatcccccggcgctgccttctggcaatacaaaagttgctgtggttgtcccctggaatatttctcgtatccgtgtgctgaagtcctcgaccgtaacgccgctcagttccttatatgatgtgcgtaacagcccgtcattaccggatgtgctgcattcagcaaggtcaaaacgccatccggcgatcgataagggcagtgcatcccatttatcaatgcatttatcaataaatggttttatttcaggtaaatgttgccacggtggggcaatctgtattgcctgtttgtctgccatttcttttgccagacgaagacgtgcagcttctgccgcagcttctttttcccggtattcctggtacatggtgatcccgttccagagcagtatggccagaatggcacttccgccataaatcatgaactgacgttttcgggatacgcgagtaaacgccgcctctttcggcggtttttttacgtcaatcaacgcagacagagtgagtgaggggagtgcctggctgatatcccatgattcaggctggtatagtttccagccgggttctggtgtttcattaaactcaagaaatgttgtcagagcactcatgatctgacttttgttacctacaacatcgttgacgagaacgttattgacgcaggaaacaaagccataaagatcaccgagttcgcagatagcgtatccgtcaggttcgatgaggggttttatcatcagtgccagtgaccagaatgaggacgcccctgcgggaagatcctcttttctgataaatgccaccatcgttttggtttcattttctgaatcctgatactgacaggagagaaaatattcagcgtcgttttttcttgcgaatgtacgcgcattcttttcttctgaaggaagcgttttccagtccagaccggagaaaaaagcacgcttgtttttaataaccgaagtgaaattccggttattctgattattctcagacaaagtgacctccaaaaaaactccctgtgttttttcagggagttttcagttaattagttcacattttttattactgcactggagccggaattaagcacatttggtgtaatcaaaacgaccagaatcgtgtcgccgtcttcgctgttaacgccacccccaagtccaaagaaggagggggttattacaccttgcttactggttttccggtttgattgctggaatccactcagaatgactgtctgacctgatttcagatcaatagtttgattaattgttttcaaatccacattcggtgtttgtgctttactgccgccactttcgaacacctcaaaagtaggtttgtcagacagactcattgagaacagcaattgcaggttttgtgaatccggctgaatgtatggaagcagagtcatattgaatccggtcgttattgttgccgcattcagtgacgtggatgatcccacattggcggtggaatcggttgtgacactttcaatgaagccctgctgattggcaatttgcatagggacaggcgtcaggtttttagtcacagcggagttttgcgttacgacactgacgctgccttgtgacgacagggctttcagaaatgcttttgagccagccagcttaccgtccacgatggatacaccactggtaataacattctcggcggcatcaccaaatgagccaccaagactcagaccaagatgaccatcattaaatactgcgttccagtcgattcccgcctgttcctggcttgatttcttgatactcaggatttcaacgttcagcacaacctgacgactcatttcattattgcgcttgttcacaatctcctgaacgctgtccagtacatccggggtatctgttactgtcagtgaacctgtggacagatacatgcgccctgtacctggtgtcagcattgaggaaacttcgcttttcaggtcgttgtacagcgatgatttcatttccacggttgtagtttgcgtatttgatgcgtcgccagtcataccgccagaacttgtagagccggtactgccactggaagacattgtgccgctcacaacttttgagttgtatgccacattgctgtccatatatgtaatcgggaatgagcgcgtttccagatagaagaatgtgatacgacctttatcgtatttccaggatattcccagccgtgaagatacggtttgcagtagggcaggaagcccggagatattcagctcagggagtgatgtaccgccagaagagacttttactggctgactgcctactgacgccagaggaaccattccatttgcatcaggtgctggaattgagcctgtcatttgttgtgttgagccagtgcctgtaccgttcagataggtccagacatcggcgctgattcgtaccgggatatgacaggtttgtgtgatgcgttgtgcgatctggcgtagctcaatatctgaacgagtattaatcacaatcgggcagggcggcgctgattgctttacctgcttttcaataattggcgttgtattaatccattgttttgttgaatcctggataaccgggttattacgaatttttttcgcgtattcagtcgctttttgtgcgtctctttcggcagcaagttcattagcactgatttttttgaagtttgcacagcctgataataaaaaagaggatattaataaacaaagcaattttttattcatgtttaattaccttatggaatatgcaaaatactatttgctggttgcgaggattattcagatacgtctgttttatcgtgattatcaaggtctggattagtaatcacattgcctccggcaaccatgacttttttccctccagctttagggagataaatttctgcaatttttgctatttcatccatgacttcttgtgtaaacaggtttggaatgtcaacatgattgttacgggcgatatccacgcggcgtttaaactctggttcttcaaaccagattattttgttggcaataaatggtcggctaaattcactggttataatttcacggattgcaatatttctggctttattcttcttatcccggagagacacaatttcttcaggaagaagaaccgggcgctctattacatcatcattccgtgtacgtgaacttcctcccttaccaccaccactggatattgagcgtttggatattttcatatcacgcaccccaatctcttctgaaatctttttagccagagcattttttgatttcggcggatagtaaagcacaacagcactgttttcagtgaatgtggtccatccttcctgaccgtacatatcgcttttttgcccttgtccttcattctgaagaatgaacataaagcgaaggttataacctgctgtaaaaccaacagcgcgttcaatgacctccgatttacccattgatgtaaattcatccaggagaataagacactggtatttcaggtccgggttgtgttccggtagttcacgacagttttcattaaccagtaatgagaagaaaaggtttacaattttctcatgagtgattaaagcatccggtgtcagaccaagataaattgacatgggctttttacgaatatcccggatatcaaaatcactgaaattcgtcgcctcagcagtaatagggttgctgaagatgctcagcggtgatgaaaagtttgtttctatacttccccttgtgcgatctggtgctgacatgaacttaaagaagaatgattttgttttatcgctaatccagctacggttttcaatttcctgtcccatccatgcggcgagatccttgccgccatcgggaaccgacgttttcagtatggcgctgatggaaacaagaacgtccggtacattatgacctttggctttctgttccaggtgaaaacgctccttgtccagcaggtaaagtcctaacccgacaaaaaggtttcgtgcagaatcagaccatataggatcatcacttgccgggataaggattgcggcaatttttgccaggtccgtttcacgaagtaaatcactgcgactgacgcaatcaagaggattccagcggtgagagcgtatctgtcctttaatggcctggtcgatagtttccgcgtatccggcgggcgcaaagagaaagcattcttgccctaattctttttgcctgaatccggctgataaaaaccagttttcaagtttgatatccagtatgaccatacttcctggatagtttacgcagttggggataacaatccccacccctttaccagaacgtgtcggggcataaagaattaaaaattgttgtccggcgaaataaataaattgttttttgtatctccccttgaacattttaccgatgagtattggtggatgtttgtaaggtgattttttatccgggaaaaaacctgatttactcaggtccatatcagttgcgagccgggcgtcaccgtagatgacttttttaggcataatcccaatcacgacaatcaacatgaatatggcaaagaatattaatggaacgctgaatccaaaccatgccataaaaacgagttttttatattgtgggttgccagaaaatgttgagattacagaatggaatgtatcccacttgagcaaagacatatcaacggatgaatatcttaatgctgtgtatccaccgagatagtttgaggctataagcacacccacaagaagcagtaacaggaagagaattaacccccccgtcttttttgcatccatagttatctccagagtttacattgtgctcaaaaagcgatttttttcttcgggttcgtaatacagttcagtcattctggtatggttgaaaaaaagaatgacatcaattgatgtttttatcgtgcgcatgatgaggtccatatcaacagtcataccaacatcagattgttttacaatacttgccagtcgtgaaaatgaggcataagtattattagcatgaatggtactgattgagccttcatgccctgtattaagcgcctccagataactccatgcttcgttacccctaagttcagcaagaaagatgtgatctggctttaatcgcatacacgcttcaatgatttccttcgcttcaacggtattttttttgtagaaaagccggatgtggtttggatgcagcggcagagacatttccggtacatcttcaacggttatataacgccgttcaggtggaaagatatctgcaattgcctttgctatagttgtcttaccggagccagtcccaccgacgattaaaaaattaagacggtctttaactgcctctcttaaaaattgagctttagattgaccatctggacgccgggataattcatacaggtagcgttgccgttcagtcaggatggcttcgtgtttcgtcgcaatcctgacattatcaaaacgccctgttcggacataatcatctatagtaaagcgcgttaatgatggcttacggatagatatcacaacgctgttattttctgttgcaggtggaatgatgatttgtccacgttccccaccgggaagaactaccgatgcaatgggattatcatggctaagtggtatttttatctttgataagttcgtcagagttttggcaagtgtcattaaattatcaaaagtcgcgtctggcgcatctttagattcccagccatttttcccttcaaaccatattgttcctggtttattcacagatatttctgtgacatgttcaatattaagaacagattggatacccgtcatatccagatatcgtcttgcggttttactgttatctcgtggttgtgatgtattactggtatctctgatgttattcatatcaattgctttactgaattactgaagttcatatacggatgaaaagtcgatatttcgcggaacaataacagacaatacagtcccctgattaatatatgccgtggggggaatatttatcgtattgtccagcgttgtttttgccatttcttttgttgcgtcagatgtgttttcgtaggtgatattgctgtttgagcctgtttgttgcgtgctgtttttcagaatatctaaaccatcaccaagtaatgacagcagcaatgcaccaccaaaacgctgaccaaaatgattatcgacccatgcaggaaggccggaagcgcccagactgtcagtgccaagtgcgccaatgcgcacattgacattttcatctttgagcgttgtccagttaacgaacacacgggctactccctgtgtcatgactttattctgctccccgatcagtaatgctcctttatgggcaagaagcacttcgccgttatccgaccagacgtctcgtgttaactgacacattgtgataccgggataagaggttacgattttcgttttgagcacacaggataatgctgttcccgcagataacagatatcggcggttcagcacaggggatacctttccgtctgcgtactgactgccctgtaaatcatctctttcctggtttttttcgcctggttcctgattgtcgatcttcaccattgtgtcgcccatcagttgtcggacggattttggcaatggttgtggttggtttggatctccactggcggtttggggagtgccgttggctatcacattgacggctgtttgatcggccttttgtgatgctggcgctgacggggcattgtctgcctgtttctgttcttgctcctcctgtgctttcctgcggttagcggcatcgagtttttccttttcttcgatgtttttcatcattgttgtcagtgaaacgccattgttggtatttgtgaccagtgtctcgtcagacttctcaagaggtgtttgctgaacgacctgttctcgtgacagaactttaaacaagataatgatcacaaataacgcggcaatcagtaatatgatgaggattaatattttttttggtgctgctttaccttttacttcgataattccgcgatttcccgcgtcattatttttttcatcatctttatttttcatagctgaacttctctactcgtgtttttccgtttgacgtaccttttttattccacggacgattaacgattgatgatgttctgatatctgcaacctgatcacccaggcgcaaacggagattttcagccacgtcatagtaaaccattgtgtttttatttctgtctccgttaaccagatgttcatttccatcggcatcaacacgataaaggaccggaatttcctgtttattagtccatctcatgcatgtaaattcgccattatcccatacctgataagggaaaattgatttgtctcccttgagttgataatgaccattaattattccaccatcagtgcatggaaatggcttttcagtcattacggtagctgacggtggtttcggataattaaaacgcagaatatacgtgggttgtttcgtggttgatatcaggtaaagaggatatatatgcttattggtctgaacggtaacgtttgtatccggttcttctgcttttggacgcagaaacagagtgttgtccctgaccgatactgaccaggcttctggatcaccaattccgacatcttttattgtttcgtcttgtccgaacttaattgttgtttgtgcgcctgcttttacgcgcacattaaatacatcctgctcgttataatctacggtctgaatacgcccgtctcgttccgatggtgtgccgtacatagctgctaaagcaccaggtacttgtagcatcgacaaaagaactatcgcagtagtgcgtttaagcatcattttataacctctggatcaggttggtagctcagaacttgcagtcccagcggattcacaaggcgctctttttctgttttgatatctttatcccagtcaaaagaaatcgtcgaaatccactctgttgctctgtatccgggggcgggtttaccagataaatccagtaccatttttttgaaacgcacctgcgccatatccttccttagaaggattactgaattaatctggaccttaattttgtagttgtttttcagaatgttcagtggtgaggaatcagcacgaatcatggtgtcataagctgaaaacaccttttgggaagacattgtttttactgtatcggcctgttcctggatggtctgccagtcgtatgcttcatagttaatgagatattttgacaggaaatatttagtctcaacatcctgataactttccttagcatcagataattgaggggcaatatcagtatatccagtgctgttatccactcgcacaaggaacggtacagcggtttttaatggagcaagggaggctattgcgaaaccaagaatgcaaattacaacaaattcaccaatggcgagaatggtaaatgtttttgcctttttctttatgatttcaatttcactgcgctcaaagtcacgtatggccttgaaataatcctttttttcgtttttttcttcaaatttctttttggtggcttctttttttgaatgttcataatagtttgtgttttccattaataatcacctgctttgatctgttcaattgctgtgtttaactcaaaccatcccccttttttctgcacaggattgggggtgtgagaacatgcactaattaatagcgcggaggcaattatgagggggattttcatattgttttccgttctgtataaaacagagaaattaaccgttcaggcgtttcaggagttctggtatccagatatcaggagctacatctcctttttcagcaataatctcatcaaaaatagacaggccagtttcagagccagaaagcacggggataaactcatcgaatccaaacaaatccattttggcgaaaacagaagagccagattgcttgatgagcatggtccttgactccttcgtcagctctttgagtttttcaaactctttttcagtaagcccaatttctttatatccttcccattttgcatcgggattgggcaggagaattttcgttgcggtttgttgtaccagcgccgcaaaaattgcgcagtttatggcgtcttccggggactgtgatgttaaccacatcatttcacctttcatgcgccccgctttcagtgcgcttttaatcatgctttgtgtcatgggaaagtttgctggcatccagaactcttcaataatggagagcatcagattgccgccgcgttgcatgatttctttgtagaaaaacaggaccgcgagtaaaggttcacaggcaggatgaataccgttttttgtgtccaggacaacggttgtatcaaaacccacttttttatgatgcagtggattgaaggtattccggggggaatccaccgcccaggcatattcgccgttgtcgcaccatttggcgagacgcgtctgaagttcaggactgactatatcgagaagaagggctgtccggcgttcttcgacaggcattcgcataatgctttccacggcagcgtttaattcaatgccatgttcatcagaacaggggttgccctggttgtctcgtgccagaacctgtgtccagcgtttcagaaatgcgagaagtctgtgccagacaggagattccgggccttctgccagttgccacggattgcagccggtataaatgccttcctgcaacgtgaaatagcttcctccgtatgcacggacaaaaagctcagtagaacggttgaaatccacaacaaacattaaagggtcaaagcgttgaagaaaaccgctggctgctgcttcaaatgttgttttccctgtgcctgttgcgccaagaatcattccatgcccggcaattttttgtccggtaacatttttttccggtgggctgtaatgcgtattgaaccagtaaatgctgtcagacaccgttttcaacggcattatggcggacccatcaccaataggattgcctgattttttcccggaggaataattgtgaaaagacatcagacaggccaggttggttattgttcttcgggtatccagtggacgcctcttattcagcggcatatgactgaaaaaaacaaaaggtgatgcgagtgaggcgcgactgaagcggaatcccttacccgaagtaataaactcagcagagagctttataccattgcttctggcctgatctggtgtatcaccgaataccgttaatgcgcagtgtagtgaaccaaacaacgtaattccggctgcgaccgcttctttaccagcttcgagttcttcctgttgtgttttggctgcatcattagctgattgcagtttgtttaattgcgaatcaatgttcttcagggtttttgtgggtgattcaaaaataaacgattgagtaagaataaattcatagggttgcttgagaagaaaatcccattgtccgggggtcgtttctatagggaaatccttcaaaatataattcgttgcaaactttttactatccgattcgttgttacgcagttcaagaacatcagcaccaaaataccattcagaatcacaaatactggatgataagggagtggatgataaaggaatcatgttatgttctgtatttagcaatagtgataaatagtctgccacctcactaatataagtattgtgaactgataaaacagaagcgttaaatggctgaagtgctttttgcgcctgttgtgtcatttcattcatgcgctcgattccggtatcaacatcatcgtagggaatcccaaatgttaaataccatgttgatttgtagaatgcgctggatgtgaacagagcaaggtatttttttgaaaacctgcttaaaaaagcattgtcaaaattccattctccatcaatggttattctttttttgataagatgagtccataaatacaggtcgccttcctttcctaacccaatcaggaagtttttaacgctgttaaataaatttgtaagaacattatcgttctctgtctcaaatggaatgcctgctacaacaagtgaagccagcattttcctgtcagaagtaaagataatactgtctgttatatggaagcgataatcgggatattcacgagcaacatccatattgtcactgttttttaatttgattttgtgcatatatgttacctgacagatgaataaccaataattaaatctctgtggcggatttttaacaaaagccccataaggtttaaacggatgactcttagtgcgtttgagtcattttcacaggccagttttactataaaaagaaacagcgcacatatgacaggaataattatcccttttataccccaaaggaaaatagcggggaagcctgtcagaacagcgaaaaaagccgtgaacaataacaacattaagggtataccagcaattaacgcaggacggttaaacccgttataagtcatgaatgactcactgacatgttcatttactttgtccataactcaccatgaaaaaagccgcaattcacacataaggtaaatatgcggcacagttgtatatatggattacttatttgaagagttccagcgcccagttcccggcgtaaagtgcaccgccagcgagggaacaatagacaagcgccattcctacatcagaccagcttttcttctccatgaatgccatgatgacgttatagatcaggtaacacaaagcacaaacaccaccaaagctaaatgcccatgtcttaagttctgtcatggtatttgttgcggtgtcgagtccacctgcataggcaacggaggcagttagtgacaggaaaaacgccagaataaaatactgcaaagttgatttgactttcattaactaaaatctccaaaaacatcccagtccggtgatgttttctcttcatcattcggggggtttatttctgattcatcagttttttcacggattgatggcacgatatagttattcgcgttacgaataacccgttccagataagaagtgttgttaaatttcttttctttaataaatcctgttgattcgttacccgaataatacaaagataaagctcggagaattttttgattactactaccctccttttgtctcagataattgtccgtcaggactgccgctcctgcttttatatttgtacacgggtcaaaaactgttttatttgtcagattgagtgatgggaaatttttgctgtatatctgtgtcagacctgcactaaaccttttattttctgctgttaatttttctgcatattcaatagctcctttttcatctttaaaatacttacttgttccgtcagaaacattcgctattacatatggattagcccctgattcagtcataatcagggcattcatcgtatcgggtgatacatcaggggcacactgacttatcagtgctgccagaacagccgctgataactgcataagggatttatctcctgatattaaattcgtgaagaacgttttttcctgcgggggcgacgaacgatactgtccagctcattagcgccggaaagaagttctttcagcgagacaattttttccctgacaggtataagggattttgcccccggacattgttcaaagtctgatttgtacaggtcgtataaaacaagcgtatgttttacatcctgtgacagataattatgtttattctggatgttaccttgttcgatatttttgataatatctgctgaacgatgaattaaatctgtgtagattcgggtgtttttaagaggatttatttttatatattcagaagcaagctgaataagattgcatcgtaagataaggacttcacgagtggcaatatcaagctcgctgacatcatcattatcctgcatgggtatctccggtaaagattttctggactgaagtccgcgccgtagcgatatatccggcccacataatgatgtgtcggatatgcagactccagttcagaatccccttgtcaggggatatttagttaatgagtacaatagcctcttctggaatggaggaaggaacgggaacgcccatatcattcccctgattatcgacaatcttcttattttttactcttcctaacattgctgaatgttttgtttgctgctgcaaagcagacatcagaccttctgtatcggcagaccagatataaactcgcttaccgtaaataatatgatgaatatcataaacgggtgttataccgatttgctcagatgttaacgttcctcctgaattacgtttgtctggatatttataaagatagtcattgataacatttgcgaaatggacaaattcaattgcttcctgttttgcaggaagcaacttcattcgctgtatggtttggttattgttatctgtcagatagtaactgcctattgacaggaatatcaggagcaagctgaagaaccaacccatagcgattactcctgttgtgtgtctttaattgtgattacgcattgtgcaatattcctgaatgcgtataacggtttatctgctgaaagataaagcatcagcgtatcttttaatgcagattcaaagtttccccggaaaataagaggagcatctattctgtagttcacaggagtatcccatacaagattccaggttgaattaccacacggcgaacttgacgcccattctgtgaggccatcccgcagcgtcgaaccttttttaagattccaggtgagtttttctgtctgtttttgcggaacggtgacaggcgttagcgatttttgaggtaacttgtcagaggaaacgggtgtcctgacaggagatgcaggggttttgtcaggagatacaggtgctttttgtgatgttttccctttctgttgttgaaaatcaatcagaagatgtcttttttcggtgttcttaattaccgtcagaccgtagttgcgaagcattttatccaggacataaggccattgatcgttgccctgccaggatatcgtgcgacggaaagttttcgttacctccggggatatttcagccgtccagtccgatgggacaatttcttttactgctttttgcagcgagcctttaccatcatggcgaacaaagtaaatttgcttttcaggtgttgatgggcctgtaagcgtggtggccggaacagcgttgttagcgttttttttcagaaaaccgctttttgacattagcggtggttgttcaggacgcggttttgtctgctgatcagtattttgtgccgtttgtgtctgatggttgttgctactgattgactttgcgggagagagtgctggttgttcagaatgctgtttagttgctcctttagctgctgtttttatctcaccagatgaagttatgctgtttgttgtcggcttcagaaaactattattgctgccctggttttttggcgctgtcgctgattgctcagaacgtggttttacggtttctgcaatacgaggcgcgggagttacgtttatagcttcctttttgagataattgtcattgctgtattgaacagtgctgtttggctgtgacacgggctgctgaagggccaccccgttatagtatgtgtctgctcttacctgctcaattgtggtattcagttcataccaacctccttttgcctgtgcgggttcaggggcatgggaacacgcattcagcaataatgtggtgggaataataatgagctttttcatggttaaccccaggaacgtccgaacttactcatgatttttgagatcgccgcagggtctgcggtcgtgcattgattaagaaacgcttttcgggcatcaaaggttttgctccagcgaatagatccctttttctttttgatgatattaaagaagtccttttcggcgcttttgcattcgctcccgccgccgctaccgatagctttaccgtacagacaaagaacggaagcacacggatcagacgcatatacgggggcagagagtgcgatagcacttgcggcaaccatcgataaaatgatggatttcatggtgttcctccatatttcagacaaaagaaaacccgcacgaggcgggtaatttaaatatcaggggaatcaacgcacgtgtggcgtaatgatgacaatccggttctcactttggctatcagcattaactccagtaaaaccactcacgataagggactggtccggtttgagtaaaatattctgctcgacagtctgtttccgtatcgggtcagtggttgtgagtagcaggtggaaatttccacgctcaatctccggtgctatccgcattgtgaagccagcagtccgatctttttcagccagtgtagtgtcaccggatattgcctgacgggggatcagttccgtggcaggttcccagcttccggcagatgttgtttgtgattcaacgcacggggtactctgcattattttgcggattgtttcggaggatatcgcctgaccgtcatcaaagaatgcactacggaaaatcacgttctgatttttggcaaacaagcctggatgccgctcgctcagactttcgtatatattcataccattcaaacagacaggagaactgtccggcaggtctgttcgcacggtatcaattttcaacgttatctggtggtcatttgaggttaacggtgactcaggtactggttgtgttttgctatccgcgcagcctgacagtaatgcggtggcggcaaccatcgataaaatgatggatttcatggagttcctccatatttcaggcaaaagaaaacccgcacgaggcgggtatgaatgagccattagaggcggaattgcactctttgtttagttttgatatctatcctggtgcatcatcagaacagaatactggagttaagttggctatggcgcggttttatttaaatgttccgtttgaagaaaaggatttggctaaacaaaaaggggcgcaatgggaccaagagcaacggaaatggtttgttccacagggaaaaaatccaatttattttattcggtggataaaagaattaaatgaacatgattacaatgttttttcgcaacgtttttatattgcggaaagttaccagtcttgttggcgctgtaagaaaacaactcctgtgtttggtatttttttacctcgttggtataagtatagagacgttatttggggagttgatcctgccgaatgggaagattgtatattagatgaatggtatgaaacatcctcccctaagggtatggagtattttgattcaaagaataatatgatttatcggtggttaaccagtagagtatggtggactgatttaacgaaaattgaaataatttcaacctctgctctctcaaggattaatgagtattcaaaattatattatccatcccatagcaaaacagcaaaaatgaactattacgcgaatcattgttgtcattgtaacgcaatgcaaggtgattttatgatgtttaatgagccagggggcgtgttcttccctgtaacatatgaacaggcggagaaaataagattccatgaagtcaatgaaacaatatttgccaaagcaagttatagtttaatacccgaagccggaggtttcatagatctttaagcaagataaaacccgcacgaggcgggtattcttttaaatagaatcaccttgctatagggaaggtgattctattgtaaacgttccattagatcccgcactgtcttcttgtactcttctttttgtgcgttgttctaatgcagcacgaacattagaactatttatcaactggtcactgcgtacagccaaaaaaagcccgctttgcgagctgtttttaatgaaggattattgcatcatatttttaaatgctttacccgattgctctttttgaatggcttcacgcgcattttcgcagttttgaccagacatatcccctttgctgcatttttcgacaacatcttgggcttgttcaagatgttcagcgtagtaactgacatcataaactttgtcttcacaagcagctaaaaggaagcatgacaagatagttaaagtgcttatgaattttttcattcgaacacctattgcatcattaatttaaacttttctcgactaacagcctcttgtcttgcattttcagacgcgattagctgtctctctgcaatatcatattgcttcaattgtagctccattgtcaatttttctgtattcaattggttagataagtcagcttttttttgcggagtatctgctgacgcgaactccttctgtaacgtggttaatctcttagccctttcctgcatttcattgttgaaattttcatagaatttgatcttagccaggattgcatcatatttttgttgcgtctctgcaatgttgcttgataagtcatattgcgatcgcaaagagctaagatctgattttgcactatttgttattgttgatagagaatccttcatatagctggatgcgctatcaaagccattgctgaaatcagtgaagccttcgagtcttttcttctgttcttcagcgtatcttatggtctgttcatattgttgcttgagttgctcaagctgtcttgccgcttcagcggcacgatttagcccttcttcaactgttttagctatcgctgtaacgtctactactggaataccagatgcaaagattgatggtgatgttacggtaattattccagcaaagagaaatgataatactttatctttcatgttaatcaccccgctttaagtttacttccacggtttaatccctgaactaatgctgatgcagaacgacttcctgcattaaagattggatttggcattttgctggcaaatccattagtgaaagatcggagtcctgatgctcgcataaaaccagatgcaaccttacctccaaagccattagcggctgatgtaaggccatttatacctaccccacctgttaatgtagaacagagtgtgccaacttgttctataaggaatatggaaataatcgtaataaggaaaaagtaaactacaatagatagttttatatctccattaacagggacaactgattcaacgaaactaattaagaaactaaatgatatgctatagaataaatttaacagtatatagttgagacaactgccgacccatgcagtaaacatatttctggtcgatgaaaatagagcgaaacaaatgaataaaatgccagcggaaagaagaattccaaccatgaaagttgatagtgtcaagaaaacagtagtgtaatagatgagaagcattccgccgatatagccaatcccccatactagataaacccccattttctcagcaatttggaactttccataaatactcatacttgtatcaaggaagttgtttaaattcgtagatagagcgttccacaaattatcaacactggttgcagttcctgaacctccagtaacagcagcagaaaggtcggagccagcgtgcattacaaaaggaataacaaactggctgtaataaggcgctgaataagtgaatgcaccaaccagggcgaatgcaccgatattcttagtcacctcgctcatcaggacgtcacgttgggcatacgtgatttcatatattagataaataacgtataaggctatagcagcaaagaatgtaggagatattgcctgtgcgaccttagcggcgttcgtcgccgctgtggattcaacaatggttgttactttctcaagaaattctgaaacaatgttcatagcttagtccttctggcagatgaagagttcaccagaggcactaatatttggcttcagcttaattaccaggtctgtgccgaaaaaaattgcttctccaattttttggaaatttaatgtggattcttctttattgtaactataaacgttgtgggtcgctgtcgatgttttggttttgcgtggtgtaaacgcttttttaatgatgtaatcgagagcgtggctattatgagatggtaaagtgattaaatcgtcgttttttttcataatgtagttctgatttttgaggttgaagataattgtcggtcaatgcttttgattttttttcgtatctcaattggattcgcctcagataagttagcaatggataaagccagttcgatttgtaaaattttccttgtttcgatgagattgatttttacttgtggtatatcacggaagacaccacagccggtaattgcttttgaaacgacacgttctgtattcgctatgtttttctttactgttcgaggggggacataacgtgcacggcgaagttttctcagattagcttttgcttgagtcatatttgtatgccctgaataaataaatgctttcttcaaagcctgaataagcataaaccaggattatggtggctaaaggcaaagaaaaggtgaaatgaataacggcattcagaactgaaccggttaatgtatataagacaaacggtgctgaaagtatgaaagtacccagcaggaaagaaaaaacattgcacgccatttttaataaaaatatttttattaggtgatgtttttttctgtacatttcatcgtatccttcagggggctgtcaccctctcacgttgttgctttcatcagcaagtgcctcaataagtttattaatacacgcccgttctgccggaacctcccggcctgtaatcgggtcaaaaacgacatgatcgctttcaacgtaacgtaaacggtgatagacatctatacggagttttgttttagcagcttcacgttcaactcgtgttaactcttctttttctcgtttgctgctgaaaaacagaaaccagatcattgctatgataattactaaaaaagggacaacggtgcctaaaatgcttaccatttctgccatgccacccagaatagattgaatctttcctgtggctgtggtggttgttactggttcagcaagatcagaaccagtgtctgataaaaatgtaaataaacgggcagataaaccaaatagcacgccaaaaacgagaacttttattatcgaaccgtatacatttaatagactgtattcttcctctttaggcgattcaaagttttttgccctttgtgtctgctcttgtttagaaccagaaacacctccgatgaataagccaataccaccagtacctaaaccaatacccccaccagtaccattccatttacctgttgttgtttctttagctacaatagctgcaagagaaatcccttcatttgcgtttcgcatagaattgtcctcatactattcctgtgacacttaacaccatcaataaaatatgtaatgcagtaatatttattagcgtttttttgtagacttcaataaaatctttatccagaagtctgataataaaaatacatagtgcattcatcgctgttcccgtaagcggaattaacaacgaaagaggcatgttttattccttgctttcactcttgtcttcgatggtcattactttaagagttattccttgcatgtctgtaacaataactcttgttcccgcagggtagttttcatcgtgtaacgtctcaacaggccagaatgtatcaccaatgagtaattgccccttgccgttaacaatatcgtcactgagcgtaaattcttttcctttaaaacgtgaatgccctgtgttcaccaggagagtatctaatttcttatgttttttgtcatagaagaacttaattatcgacgccagtatgctgattgacgcaaagaagcatatattggcttcttgtgatatcggaagaaaaaagcccacaatggcgcttgataatgcaccaagactgattaatagtaaccatcctgttccggttataatttcaagtgcaatacacagaagaaacagtgtaaaccataacatggctaatctccatgagataaggacggtgattaaaacaatattgtcaccgtccgctatcttttttaagacaaatattgttgagcctgtttcatatcaactttgggagtatcctgtgatacgttttttagcagttcactgatacctgcaaccgaactcaccaggctacttgaatcaagcggcatcataaccagtttactgtttgatgctgtgccaattgcctggagtgcttcagtgtatttctgcgcaataaagtaattaacagactgaacatcaccttcagcgattgcatccgacaccagttttgttgcgcgagcttccgcttctgcctgacgttcgcgtgcttcagactgaagaaatgctgattgccgttccccttccgctttcagtatttgagactgtttttccccttctgccttcagaatttctgactggcggataccttccgcttcaagaatacgggcacgcttagttcgttccgctttcatttgcgcgttcatcgcttcagtcagttcttttggtggtttaacatcccgaatttcaatacgtgtgaccttaattccccacgggtcagtcgcataatcgacaaccgttaacagtttagaattgatgctgtcacgttgagaaagcatatcgtcgagattcattccaccaacgacagttcggatattggtcataacaagatttgaaatagctgatgcaagattatcgacttcataagctgccttcgctgcatcaatgacctggacaaaacaaacagcatcgatagttacgtttgcattgtctttcgaaataacttcctgtttaggaatatccaggacggtttccatcatgttgatccgttgacctatgcggtccataaacgggatcaggaagtgaagaccgggggaaagcgtatgggtatatttaccaaagcgttccactgtccaggcattaccttgtggcacgattttgacggcagatttaacgaatatcagcgcaactaaaattaataagagtaacggaatagatgtaactattggcgtaattatagcgtcaatcatgattaatcctctcccaattcatcactgtggatgtatttctttgcaaatgaaatctgaaatatgaacatcaacagaaaaacactttcctgcttctttttcttttgagaagttttttctgcattcttcagcgctcatagggaagtcgctgtaatgagtccatttcacggggccaccacctggttttttgatggttgcgtttatttggtacttaggcattcaaaaatacctccactcgatcacctgtctttcttgaacacatccagcggcgcagttctgtaaaactatcctggatctcacaacgggtacttttcattgtgacagttggtatattgtcgtagctggcatatgcaatctcttttttgggtgtgcgcaatatgcctttgtcaatatcaagaatcctgaacgcgctaattcttcttttgtgctcgttaaatagtgttcgtttagttgctgttatctgcttctgtgcttcctggtaaatgtaggtaagcacatcataagattgttgctgtgtaataaggaaattacggctaacatccattgttgtgagcgttttattatttcttaatccccaataagccacgatgatatagagtggatatcctttcaaatctgccacacattcaggaatgacaggattagtttttaacttacgcgccatattttctcccggttgtttgtctgaaatagaaacatccccggaatacagcgtcataagctaattatgaaaagttgcagccactcactacaggctctttatctgattgttcatcatcatgcatagctaaacccccttacctggagtggagactggcaaatctggtgtacttctgcgttgcagcctgtacgacttgctcagggagagagtgagtgagattaactcaacgcgagttcaccaaataagggggtttaagtatgcagaatgatatttgcggataaagagtcgttacctgtgtagatggcgcggcacgtcactctgttacgtagcccgttgctgacagatgccagcggtgcttgaaatgcacgaataataacctccttatgccagggctttaggcaatgaccgctgtccggggttgttaaagagcatgagatgacaagcgttctaacgggcgtcaaagagtgctcattttccaggcaatgagcacaaaaaacgcgatgaacgagctttttacaatcatctggatagtattgtgtgtgcgacatttaaaacctgtcaatgccacaagagcgatctaatgatctggataacatccaaaaaacagaataatattctgtttgttaaatgatgtacgatctaaaaatctagataatactgtttgtgtggtttattcgatcgtgtgaatgggtgtatgcagtcaaaaaaacttttttgaatatacaaaattctgaatttctgattttgtaaggttttgtatggggaacgtcagtaaagaaggggcttcagtagctgttctgaaaacgattttgaagcagtcacagatgtgtgctgaatcaaaaaggaaacgagccaggcttgaacatcgttgatcgattgcgcccatgctgctaaatttgcaggcaagttttccgcgatttgtaaatgccgaaaacgaggtgctgaaattttgttcaagaacgtaaatttcagataaagaaaacccccgtaatctcgtgttttccaggcagcgtagattagcgggggttgccctcaaggccgagccttgagctgataacgttttatttcaggtatgcttgttacctgaaatggagtttaattccatgagaaggaaatatcaactcttacagtgcaagctaagtgcagcttgctgtgattagcaaacgtcactggtctgaactatcaccggaagagcaggtccgtttctggcaggactacgaagcgggcattgaaagctcattcctggtcccccaggaaaacaaaggcggaacaacaaaacgtcgccggggtgaacattccactaagccaaagtgtgagaatccagcctggttccgtcccgacagctataaggcgctgggcggacagttgggccacgcttacaatcgtctcgttaaaaaagacccggtaactggtcagtacacactcagaatgcacatgtcgttgcatccattttatgtactgaaacgtcagagtgtcggtcgcaaatataaattccgaccggagaaacagcggctgcttgacgcaatatgggttgtacttgtgagtttttgtgatcgtggattgcacactgtcggcatgtctgtctcccgcctggcagaagaaataagtccaaaagacagtaagggaaacgttattcctgaaaccgcagtcacagtatcgcgcctttcccgtctgctggcagagcaggtttgctttggcacgttgggaacgtcagaaaagacgatatgggatcgtgaatcccgccagcgactgccgaaatacgtctggatcaccgaaactggctggaaaatgctgggagttgatctggtgaaacttcaggaacagcaacgtaaacgccttgcagaaagtgaaatccgtctgcaactgattaaagaaggcgttatccgcgagggcgaggaaatctctgttcactcggctcgtaaacgctggtatgcgcagcgttctctcgatgccatcaagttccgacgagagaaagcagcaaagcgcaaacgtgccaatcgccttgcaaaactgccgtatgatgaacagcgaaacgaaattgcacggtttattctgaaacgtatgccgccggacgaagcgtactggtgcactaaagaaagattagagcaactggtagccagggatctacgtcagcttgaactggccctgacagcttcgccaccccactagtttagctgcctgatacaatcggcactctcttcagccccttcggggcttttcgtgttgcctgcatttcatgaaattcctcatttttgacgaccgtttttcattttgtcccgctctgacagttttttgatggccacaatcgggtatcggagctaaaccgccttcggttattaacaaaaacccgcaaacgaataacttcagaaagcagcaaacgtagaagatcaaacccgcaatatattcttaacccctgttctttaatcccctgcgttgcttcgccgcagggaaaatatttatctttgaaacaactgtggataatcacaaaaatgccttcgcttgcagcggctaccgccgcgccgctcagaatataaaagtacctcccaccgcttcgcggcgggcatatggacatctgcccaatgaaaaacaaagcccctccaaccctccaaaaaacactgcaaatactcagcaacagcgcccaacccatcactgcaaagcgccgccgcccccgcccaaagggcgggaacaacatcgctttcaataatggatgttgtaactaagaaatctcatcgctgtcagccttctggctggaagtaccaaatacacgctcgtaagcggccctgacggtccgctaacgcggagatacgccccgactgcgggtaaacccttgtcgggaccactccgaccgcgcacaaaagctatttcatggctgaaagcgggtatggcttagcaggatggggatgggtaaggtgaaacctatcaatcagtaccggcttacgccgggcttcggcggtttagctctgtgccatataaaacaacagagtgccgccttacatgccgctggcgcggcatcaaaaagaaagccccccaataacggggggaaatagcgttttgatcaaaatgataatgctagtgtgcttcttgcgtgccattccaggcacaaactaaatttaacgtttcgttaactacaaagaaatccgatgagttaatcacttgcggaataaaaattatatagtaaattactatatgattttgcgttgtttcggagaattaaaaaatgcctttgattgaatacatcaacaagttctatcgggggaatcaggcatcgttcgccaggctgaccggagttcaacctgcgcaggtcacacagtggatcaacaaaggattcatcgtggtgaatcacacactgtatagtccacgccgaaagctgggaatttaattccaggtcaatatataatgctgttggcgcttgaggctttctgcctcatggcgaaaaggtggtttgtatcttgttgtgcggcagaaagaagaaagccccgtagttaatttttcattaacccacgaggcgatcccaatgcttcaacaacatcaggatagcctcttaccgcgcgttacgcaaggagaagaaggccatgaaacagccgaaaaacgccctgacctggtgtttattaatcgtgtgctgcacattgttaatattcacgtatctgacccggaatcgtttgtgcgaggtccggctgaaagatggaaacagggaggttacggcaagtctggcttacgaatccaacggtaagtagcaacccggaggcgggcgaaagcccgcctttttggggatgatgtggttctggcattaagcgcctttgcaaagggggtattctgtacggataccccctttttccatgtattttcaggatattaactgctgaaaatggtataattagtcaatatgacagcaattattgaggcgagtatgcagccaaaaaaaacacccgtgattgtggtcaaaaaacgccgcgttctggtcatgccagaaaatcctgtggtgaatgaaaagccgcaggaagtacaaaaatcagcagttaatgaaaacaagaaagtacagaagaaagatgctgtagcagagaaaacacataaaaagcagcctcagccctggtatttgaaaaaacaaatcacttttcccccaaaatatccgaaagaatattttgaaaagtgtttcaataaagttcgtgctgtttttcctgaactatggacagacgaaaaaaagaacttgcccctgaaaagcgggattctccaggacgttgagaaatacctggcggataacccggatgtggatctgacgattgaagagtggaattgtgcggttcaggtgatgacgttccggtggcaatatcttcagaattgtactgtaccaggcgcaacacgttacgacctttacgggaaacctgctggtacagtaaaaaaagcacacgcaacttatgcgcaactggttctcgatgcccgtaagaaagccagcgagaagaaacaattaaaacgtaagggataaagccccgaagggctttatcatttcagcctggctgactgtagaatccagtgattttttccgttttcgtccaggccgtgttcgtaagctgcaagagccgctttcattattgctgtttttgtctggcctgttcgcagtgcttcccgttccagaatatcttcgtaaacgtccccaagccggacattggtcactttagttgctcccgattttttgcgggtagcttcattgatgaatcgggctgtgtctgcattggtttgttctgttttttgtcctggtattaccggagttttcaagtcaagagccattatatcacctttcgtgtgttacattagctttactgtgtaaagttaatgatgtaaagctatcgtattacatccattagggattgatgcctaactcttgcgccaaaagctctatttgtgctttagctgtagaaaggctggatgcgcgacgtacatcatgaacgccagcgccttcattacaggccgcttcaaaaatatctaaatctgaaatacgtgtacgaagtggctgtatccacaccgggttctcccggagtaacttgtcgagatcaatcgctgcttttctgtggcgtggttttgtcgtgttaattctcgtgaaaagtacccagggttgcaggtctggattgatctgttgagctgtgcgaactttttctgttacatgagtcagcgtttctgcttcgaaatctgaagacggcttaacgagagtaagcagaatgtcagctacagttaaggcactgcgaaattccttgctgtcatgccctggacagtcaatgatcagcacttcacatatttttttcaggcgcttaatgacttctgatacatcgccatactcttcataaacaggaaccggtaataagccattctgctttcttttttcgttccagctaagaatatcattgtttttatcggtcttcagaatgatgaccgttcgtgaattatttaccagataagaagccaggtttgttgctgtggtgctttttcctacaccgcctttatctgatgcgacaagtaatgctctccccatagaaacctcggatatacagtgtaaaggtttatttgtctttacattgtattcattatagttacgttgtaaagatgtttgtgtctttacaatgtaattgtttttgtgctttacattgtgtgtatgttacagggtaacttttcaggatgcgattttgcctggtgtgttgttgcgcccgtagctcgctgacgctcacacgcgcagtacagcgccccgccctgctgcaatgcaccaggacggcgtaaactcgctggcgctcgcgctaactgcggcattctgcggcgcaaatcagcatgatcatggcctgtcagtccgttgggctttgcagggtgaagggatggccctgtgcatcctggtatgttcgtcagcggctgcgccgcgcttcggggcgatgtggccccgctgctccctggtattttctttcgccccttccatgccctgtcgggcatcacatgaatgtaactatatgtatttgatggtgttttttttgaagaatggagggaaaaatacttgataataggtcagttctgacctattataaacacatcgggaggggatggtccccaaccaccaaagccgctcagcggcaggagataaaaatgaaaacattaacttttaataacggcactgtttctgttggcgatgtgtttgtatcttcctggggatatgagcaaacgaacgttaatttctatcaggttatttctgttcatggcaaaaaaaccgtaactgttcaggagattcgcgcttcggttcatcggacccattcaatgagcggatataagaccccattactcaatgatttctgtggtgagccattaaaacggcgagtgcgtgattattacagtacgccagcaattgaaattgagtcattcgaaacagcatataaaggatcaccggaagaaaaacacgagttcacatcatactactaagaaaatagttgcagggggtatcccctgcaaccatgttaaattgttaatagtgaatacaggggcttaatcgccccttttttatttggtgcgcaaaaactccgtccttcaaggcgtggagaatgccaggcgaatgcagcaatgtaatgttgcgcccgtagctcgctgacgctcacacgtgcagtacagcgccccgccctgctgcaatgcaccaggacggcgtaaactcgctggcgctcgcgctaactgcggcattctgcggcgcaaatcagcatgatcataggctgttggtctgtcctggctttgcagggcgaagggatggccctgtgcatcctggtatgttcgtcagcggctgcgccgcgcttcggggcgatgtggccccgctgctctcaggtattttctttcgccccttctatgccctgccgggcattgcatgaatgtaaatatttgtatttaacgatatttattttaaagaaaggaggaaaaaatacttgataataggtcagttctgacctattataaacacatcgagaggggatggtccccaatcaccaaagccgctcagcggcaggagcttaaaaatggaaaaccacgccaaatttgttgctactgaaattcttaatcagcttggtggaaaccgctttattgctatgacaggcgcaaagaactttgcctgttttgatgaaaatggtgagtgtggtctttgctttcgtttgccttcaaattttgcaatgaagggaattaatttagttaaaatcaaattaaccttctctgatacatacctggtgacattttcccgtgtccgtggagctacagtaaaagaaatatcaaaatttgataatatttattgtgatcagcttgaatgtttatttaatgaacaaaccggacttgcaaccagattgtaatttttaatatggggggattccccccatataaggaggataaatgaaagttcttattggtaatataaatattgataattatcatatgttgtctgcattagctgggattgcgggatttgacaggagcattcagtttacatgtgaaatatcagcaagtatcgaaattatggaggatgatttcgtaaataaagctggtatattaaagatgttagatgaatttattgaaaatgatttttcaataaagctcgtctagaaaatacttgataataggtcatttgtgacctattattaatgcattgagaggggatggtccccaatcgccaaagccgctcagcggcaggagattaaatatgaaacaatctacttttcctgttatcgtctctacaactggtcatgtgttttctgttgtgcgcgtgacgctttgcaccatttgccttaaacatgaaaaaacaggcgaggcttatgtcgtcatttttacagactgccataatatccgtgattataaaaagggcgttgttccggctcttggggagctttatcaggaagatgtcgatttgattaccggaaaaagttaaaagaaaggggctatatgcccctttactgttaaaaggggagaatatctcaatatgaagataagaaaaggtgacagacaatattatctgaataaagaaggtgatacgtttcatctggtgaagcgagtaaaaactttttctaagtctgcgactttaggaaaaacgaaagcaacggtgaaaactgttgctgatcttgtttttcatgaggaggcattcgacactatcgactttgccagcgacggattaagagagaatgataaagaaattgtttctatgatgattcaggaaatgagcgaggaaaaaaatgctaactgaaaacacaccagaaaacattaagcgtctgcggcaaaaaattggcctgacacagaaagaatgtgccgaaatatttagcatgagtccgcgtacctggcgtcgcaaagaagaacctgtcggaactgcaagcggtacagcacttacaccagtagagtttaaatttcttctgcttttagctggagaacaccctgattatgtactttgtaaaaggaataaaaagaattctgattctggaagtaattaaggaatattaagatgaaaatagaattaacgtatgacgaaatcacggaataagctacaaaaaccataactgaatttatggctggacttaatagccccagttgcattgaacaatgagcaattacgcccgtagctcgctgacgctcacacgcgcagtacagcgccccgccctgctgcaatgcaccaggacggcgtaaactcgctggcgctcgcgctaactgcggcattctgcggcgcaaatcagcatgatcatggcctgttggtctgttctggctttgcagggcgaagggatggccctgtgcatcctggtatgttcgtcagcggctgcgccgcgcttcggggcgatgtggccccgctgctccctggtattttctttcgccccttccatgccctgtcgggcattacatgaatgtaactgtatgtatttgatggtgttttttttgaggaatggagggaaaaatacttgataataggtcagttctgacctattataaacacattgggaggggatggtcctcaaccaccaaagccgctcagcggcaggagcatgaaaatgcatttcacaacttttctaaaaaaacatttcgatatagaaaaagtcgttggtacttctgattctggaaatgataccgaatctatttatgtttatgaaaaaggaaatgattgcgaaccgttgtttattctgcatgaatcctggctaaatgcagaaattaaaaagtgtggggtatggactattggcaatatatattccacattggaacacggaaaagaatattctgaacaggaactaataaaaatgattaaggagggtaaagtaatcagcaaatattaatttggggttggtaacaggctgtggggcagcctgttaccaaatgacagatcatctttggagattctcaaatgtcagtatgtgaaatgatagagcttgcaaaccgcattgtaaatggggaacctgtaaaaacacccgcgatagaagcatggattattagcgaaatcatttggtgggcgcataaccgggataatgctttagtttgagtcatatatggggagagtgtcatgctctccctttcttattgtgtagcgcgttgtattacatagttagctttacgttgtaaagattttattgtctttacagtgtggtgcgttttccggcggttgcgctgcgcttaggggtatgtggcttcgatgatccagggtatttcgacgtaatgcgttgtattacgatgtatactctttaattgcttgcaatctcttttcacgttcgttgctttgttgggccttttccagttggctgtatatgtactcttcatctttacccgtgagtattgagccggagagcagacgattaataactatacgtttaatttctgggtaatctttggttttatcgagtatggacaatatgtggtcactgctaagaattatcccactccatgagtctaaatagctcttaaaaatcacaatcataaacacaccgaaaagcattatgatgattgttaccacattaatgctaaacgttgatataaaggtatacgcggccacaccaattattgctaaacagagacataaataaatgaaaccgattttgttgcgttgctttttttctgcacgatcatgatcatctatgatttccagtatcttttctgggattagttgagtcattttctttccttatttgggacacggagtgtttaattacatagctttacattgtaaatctatgtttgtctttacgatgtaaatgatgagatgtgcagttaaaagtgtcaatcagatatcatatagtaaaatactatattattttctatgtatcacatacacagcgataaaactggataaatgacttacactgtaaagattgagctgtctttacagtgtggttcataagtcatacgaataaaataatttgcctttgtgtgtatgcgtgtgtataattatcctcaggttagggaggacatatgaaatctgctgacctgttgaaagaactgatagctgctggttgcgagttgaaacggcataaggcaagcagtcaccagatatggtggtcgccaataacaggaaaaacttttcctgttcctcatcctaaaaaggacttgccgctaggtactgtcagatcgatcaaaaaaatggcggggatttaatccccgccgactttggaggtagccatgttcttttctgttggtgtcgaaacaccgaaagatgatcatacagcatacggtatcaccgttccggtttttgattgctttgattttggatgtgtttctgctgctgattctcaggcagaaatacccgcaatggcgcgtgaagcgatattagcaatcgtggaagagatggtaataagcggtgctcattctgttgatgatattcatgatgaagggtgtttgacttattccgtcaacccaaattataaccactgtgatagctggtttgtaattgatgttgatttgtcagaaattgagggcaaacaacaacgtattaatatttcattgcctgatgtattgattcgtcgtattgatggatatgtgagagaaagtggcggcgtatacaaagatcgtagccattttctggctcaggcggcacgtcatgaacttgcatataaataaaactatccccgcgttgtgcggggattttttttgatagctaaccgctcgccgcagtccagcgaccgagcatagcgagcgagtgacgaggaagcggaagatccaccgttgccaggagaaaagcaggtacgcactatgcgttctgccctaatgatgctttcacaaaccacgcagcctgaactattacgccatgaatccagcgtaaatcggcatcacgattttcttttttcattttttcgccacttaaagccttgcttacgtgactttttaccagattttcgtgtaattcttttgcttcttcaattgtgaaaccaccaggcaaatttggcgcttctgcttccagcgatgccagtgcgatttcataagcccgacgctcaatattgtctcggacgtccaggctgcctatacgctctttgatttctttaattagttctttgtcctcgtcggtaaaagtggtcattagggactccttttcatatttatggttttcttgaatcaatttcgtctagtttgagttttatattttgctggtctgattttggtaattttctcatgctctcttcagttatttttttcatatcaagaaatgctcttgcatagaagcgcagacttgcctctttttcatgttgtgcaacataccaggttgcgccagaaaatgccgcagacaggcataatgtgcacagggcacaaattgcaatggctgttttgatactgaatggttttgctgatttagttagtatctctagttgttttttatggtcggaagcaatttggtcaaaattttgtttgattccagaaaaagtatttattgcttgtttggttatctcgctctgacactcattagatatttgtcttatatcgctttttgcaatattaatatctttattaatatcaatgctgctttgtattattttatttaccttgtctgacagaacggcatccagacgagcaggtgtctcgtctatagcgttgataattaagtttgctgttttttcgatctgtttttctaaagcaatataatcttcaagaagatcgtttattttttgatctttaaactcttcagagatactacgagacattgtttttctccaattttatgaccgggtacatcccggtcatattgtatcagacgagattgaggtttttaaaggcaacatcaagatcgctgttgaatccattcatcaacatttttacagctcttaaatttgacaaatcttgccgctcttcctttgaagaagctgaacgaattaatgaacgaaaatcacgattgtcattatagacatcatcatactgtaggccgcttttatttaaaatattgaaaatgttgttatggtaaacaacaacaggattttcacctacaatttctttacatacgtcgtcagctaagaaaactgaatattgtttgttaataggggtgtccttttcagcaagattgaaaattactttaaaacgatcctgttcaacacccatagccattagtgttgtaatggtttgaattgagtctatttgttgttttgcttctcgcacaacaggaacgatgaaataatcaataaggtcatgacttccctgatattcattcatctgtacaaggaattgctcaatatttgatgagcctacgtcaatgatggtgcattcactatcatcaatacgtttgataatttcgtcaaactcctttgctgataatttctcgtcatttgtaccatcagtgtttaatgtttctacttttataatttctgacccctccagacgaggtttcaataaagtttggcaaatggtcgatttccctacgtttccgctattatttacaattgctagttttaagtacatttttcttaccttttatttcgtatataatttccaagagtattgctaacttgtacaaagttagcacaattccaagattttattgtttctatagatacattgttatctatagcttgttgagctatctttgcattgttgaagcaaactggcaaatatgcattaagtatatcattatcttgcttcgtttttctgtttttgtcctcaatggttattgctttttgatacgttttctctttatttgaaagaagatgagaaacgtcttttttctcggccctttcttttcgtatgcgatgtaatatgttttcaaacgtctttaacgttagatcaaaaccttcatcattaagagcattaacaatatcaatgtttcttatgccttgttgctgcgcttcttctatttcagcaaaacgctctcttattcttccagttttacttcgcttgaccttctgagctaagagcgaaccaagtagtttattttctccattgttcatttgtcagtctccaggacagtgaaatcatgatgagcaattctatcatgaacgtcaagcaatttttgctatgtatatgctatgcgtttgctatgtatatgctatgccattggtttttatggtgtgtttttgctatgtattagctatgtttatggtgtgcatttgatgtgtgaatgctatggaatcaaataattttctaaaacacaggcacgataccgattgtacacaagaccgttccggtcatgttacaatcgtgtgccaaagggggacgcccctttgaaaccccgaacgatgcagccgttcttatgcggttctacgaaccttgaggacatatgaagaaaaaaaccaacaaaaacgttcatgtaacattcagacttaccgaagaagaatatgctccgttcgatagggctataaaagagcttaatattagtaagtctgaatttttcaggctgcttactattggtaaaataaacacatatgcatctgataaacgtaacataccagaatacaaacgttgtctttctcagttgagttgggcaggaaacaacataaatcaaatagcgcaccgattaaattcagatcatttaaaaggtattatatcagaatcgctttataaaaaggttttaaatggactaatcggtattcgtgatcgccttcaggagatagctaaatgattgtcagatacggtggtggtaatgatggtatcgttgattatctgataaatggtcgcaaagcagaacgccagtacacgcgtgatgaacttgatcatcgtgtcgttcttgatggtgatttacagactacagataagattattgattctattgaaaacaaaagtcaggaacgttatttgcacattactctgtcttttcatgaaagtcatgtgtcgaatgaagtgttaaaggctgttgttgatgattataaaaaattattgatgaatgcttatcatcctgatgaatactctttttatgcggaagctcatttgcctaaaattcgtcatatccaggataatagcactggtgaacttgttgaaagaaaaccacatattcatattgtaattcctaaagtaaatttgattactgaaaagttcctaaatccagtgggagatgttaccaaagggcatacaattgaacagcttgatgctatacaggaatttattaataataaatataatcttgatagccctaaagactatccgcgtaaagatgcggattacggaaaaattataagtagagttaagggggatctttacaaagagcatcactctgaattgaaaggtgagttgctttcgcgtatagagaacgagaaaattgaaaattactctgtattcaaagatattgttgcagagtatggtgaacttcgtataagaaatgctggtaaaaccaatgagtatctggctgtaaaattgcctggagataaaaaatacacaaacttaaaaagtcctctttttcgtcagaattacattgagacaaggacattaacacttgagaaaccaacacacaaagagatagaaaagagacttaatacctggttaaataaaacaagccatgagattaagcatatttttaaccaggcggagaaaacaagggaactttacaagacattaagcccttcacaacaaattgatttcctgcaagagaggataaaagaatatgactcaagagaaaaacttaacgaaagaaattctcagcaaacgtcaggacgagagggaggttacaagtcgtgtcctaaaaagtttgccagaatccgtcaatctgaagcaacagtcggattgtcacgtatgccccaacgcggtatggtttacggaatcaatggattcacaagacccgactctgtcagtgtattgtcagatatttcgcagcgtgatctggcagagcaattaccgcaaagagaacatcctggtcaggatgtgcgacgggattatgatagacaattcacagagtcaggaataaaaagtcttgaacgctcttcttttttgtgtgaaacgatgtttcagactctgaatgaggcggcagagaaaaacgaaattacaacgatggcagaaattcgcagaaatattgatcctgtcaggtttctgtcttctgccgccgagcgttttaatattattccagcgcagcataaaatcagaacagcaaaggacggttccccccggttttctgtggggaatcgtaatatgaacgcatctgattttctgacaaagcatattaatcttgcctggaaagatgcgaaatcctttctgcttgaagtttattcacagcagttagaaaacacgccatatacgcgctatccaacctacagacgccttacgcatcatgaagctcgtgagcgtcttaactcactgaatttatctgaaaaaacattacgaaatactatcaggtttgagcgtggcaagctgtataatgatctgcgagagatgagacgcgagttgaagttaataccacgtgaacagcgtgatattgccgtgggtgtgattgtttacaaaaaactaaccacacttgagcgtctttctgaactcgacacagaggggcgacacataattcgtcaatatcatgctgactggcataaggataaagatgaaatgaaagcccttgaacgtctcaaaagctatctcaacttcgatgaaatcaacgccatttctgctgacgaacccgaactttcgcttcagaaagcggtggattcccagcgccgcttagaagaggcgaaaaaggttaactccaaactaaaagatcttgtgatggataagcaggattccaggattgtttatcgcgatcaggaatcggaaaagcctgtctttaccgacaaagggaactttgtcgttgcgggtaaaaatccctcaaaagaagagatcggaataatgcttgagtattccagggaaaagtttggtggtgtactcaaacttaccggctctgaagatttcaaaaaaatgtgcgctgaagttgccgcagagcaggacatgaagattattttacgcccggagcagtatcaacagatgatgctggaattaaaagcagaacttcagggtaataagtttgagcaggtggaaacacaggaaaatagccaggagtccgaatccagaatagagaaaggtgatgcattgaaggaacaggccacagagcaggcacaggccacatcttcatatgatcctggtgttattaccagggcaaataccctggattcacagatgcttagtaaaggcacaaatggtgaatttggctatttgaaatctctggatagcgatgaaaatgagatttgggaagtgctggggcatgtacctggagacagcgatgatatctttagtgttgccagttttgataatgaaaacgatgcaaaagaattttgcaatattgttaatgaattaggaattgacagaacacaggctttgattcaggagcagcttacttctcaacacgatcaggctaccgcgcaggagcataataaacaggaaatttactgtgtaaactttagtcacctccatgatgagaatgagggtgttgtatttcattctaaagatgctgccattgacttttatgagggaaacaaatcttctgcaatagaaaaatatgaaagcaattatttaaatggtgatggttttgaaactattgtgcttatgtctaaaactgtctcaaccgatgaattatcctcttatccagagggggggatagtaacgcttgataagccatttgaagtaattgccaattcatatgaagaataccgtactccagtgtatgcggtttctttctcgaaggatgagtttagtgaagatattaagacttttgattcattgcacgacgcatctgaatataaaaataatatgcttcaggagcacggacttaaccaggatgatatcttaatcacacctgtaacaagagaagaaatcgcctttaaaggaattaaggacgctgttaatgacgctaatatggcagtgatggaacaggagggggattcgtccagagaatcaccagaagagatactcgccagtatttcagctaacgagcatatgatctccgggcttgaaaacttcctggttaaagaccgttctcagttcagttcctgcaatggggatatcgttgtggaggcggaaattaccaggggggaaggtggtctttatcaccttgcggtcgctggtaagcatggcttagagcgtggtgatgcagttgccagagtggatgttacggagcagcaatttgccgcgatcactggaaaaacaccttctgaagttttaacgggggaccaaacatcggctcgtgttccggtaattacaggtatccatttcagtacaagggctattgaaaatgtgaataaactggaacaacagaaggattatgtctatttctcaacacatgaaggcctgaatgctgaaataaaagatttcagctctctcaaggatgctattgagtggggccgggttgaatgcgagctacatgatctcaataagcgcgatactgtcatttatcgcgtcgagtctgaacatatttctcaggggattgacgctgtaatgaaaaatgctgaacgcgtggagcgtcatgaaattgagaaagcacagggacgggattgcacgccggaagacggcaagattcttgaggcaattgatcgctttgaggacaagttcagaggggaaggactgaagttcgaaagggagaaggccgaatccgatttgcttaatcacggattcactcgtgaaatggcagaagatgctcttggaaaacaatttgtccaggccagagaagagcatcaggaatcgcagcagcagcgtgacgattcacaggacatgcactaattaagaaaaaagcccggttttcgggctttttaagaaaaaaagtcaaccccaaacagaaataatagctacaaaaatggacagtaataatgcaataaaagtaatgttgagccatatgttggacgagtcttttaagactaatatggctgttaatgccattgtaatgaaactaatggtaataatggctgcaaataaatattgtacaatgttttttattgtacctggttgatccccaattctttctctgtaatttgcatcaacattagatatccattgaagtaatagagcaataaaacagcctactccgcaaaaggtgaattgcacagacgtcgggtttgaatcaaacaacgagatcgctaagttatataagtatatcgcgcatgaaatcaccccgacaactaaaatagagattagtataatccgaagaactaatgtattgctttcctttaaggaatatattaaagccgctttttcgtattctttcataatttaatccagtctataagtataagaaccaacaaaactgtcaagggaagttcaaacccattggtgttccagcatccacgtactgaaaattgccaggccacttgcaaaaagaaacatgactgtatcatgacgtgaccagcgttttttatttttacggaggaaatatacgccagcacatgcggttaatattgattccgcaatcaaaaaccatcctataagggtactgaactgaccaaatgggggagcaacacaggcgatgttatccagacaggattcattttgtgtgagcatatgaaatcccatccagagtgatgatactggcagaaacacgcccacagccggaattattagtctggcggagaatatccttatcaggagtatcaatagtgataagaacagaaaaagagtgatcatgtggaaaaacattcacatcacctataacactattaagatagcctgccagatatccatttcagacaggctatatacagggttcaattcattctatgaaaggtgtatagggattgctgatgtttgtgtcgatcaaaaatctaatattaatagatgagaactaatatacatatttccagacggatggggggattttatcgtagagtttattcattgtgagttctgcaagcctgtgatcggcggcggcattaaacgactcaagctcagaaggagggaggctgttttggtttttttcaataatcttttcaagtgtgtcgagtgttgagcaacgtcttaactgaaagagccagtcttgttttgttttcattgtacaattcctgaagaacatccttgtcctatagtagctacaacgatgtttgatttctactgctggatttatttcttacttttttgtgtaaactcaaatcccagtttcccggttgctttgtcaaccagttttacttttgctgaaaattctttgtttgttttttgactaatgaaacctttcaattcacttgtaactccttttgttattaacgtttcaatttgtttatcggttaatgatttgccgcagaaatctttccatatcttaaattcacatcctgtacagaaataaccttttgatctgattacaatctgtttaccacaggaaggacaaggagaggacaggcgttgtgactgaccagacggcgcgctgggggaaacttttatttcagcactgttcgcattactgatcatcggtatcagatcattgtacagttcgtcaacgaactgttcgatggtcatttctccgttttcaatgagtgtctgtttttccgcccataatgccgtcatatctggattaacagctatatccggcagagcatcaataagcgcatacccggtatctgtcggaataagttttcctttttccagggtgatatagttccgttttttcagtgtttccaatatggaagctcgcgtagctggcgtaccaataccgccatgttcgtcttttttatcccgatctttatccttcagtaactttttaatcactggatcagtgacaaaatctgcgacacgaacaagcgcggcaagtaaagtggcttcggtgaataatggcggtggcgttgttttcttctcattcacaaccacttcttttgtcgtcactgtttctcctgtgcgaattttacagagaagatcaaaagcggaatcatcattttcgacttctgcttcatcgtccccggcattttccacaccaagaaacgcttcaaatccgctgtctgtagttttcctggcacgggcataaaacgactcatcaccacactgaatggcgacggatacttcctgatatgccttctcaggcatgaactggacaagatagtgttgtgcaattgccaggtaaacgttgcgttcgtcggtgctcagtgcgtttacgtccggtacgctaacggttgggatgatggctgtatgcgctgttacttttgcgctgttaaatgccttgcttttacgtgtcgtatcaatatccattggctgatcaaacaccgacttcagggcatcgattatttgtggtgcttcgctgaattgttcgtctgaaagatatgaacaatctgaacggttgtaagtaattgctttgtatttttcgcgtagctgctgtgtgatatccagcgttttttgagcagtcattttgaattttttgttcatgtactgctgaagtcgtaccaggttaaagggcaacggtgcagccgtttttttatcatctgttgctgccgcttcaactgtggctggttttcctgcaagtgatgttgctgttccattcgcccaggttttatcaagcaatttgcggtctgtcagcggtgcgaactcaccaggtttccagttcgccctgataacatcagcgccgcgttgaaaatgtccggtcatggtgtagtagaagctggatttatgatttttattggcacgggtgcgatttacaatcaggccaagcacgggtgtctggacccgtccgacagacaaaacacctttatagcctttagtttttgccgggattgtgtaagcacgcgtcatggataaaccgtatatcgcgtcggctacagaacgcgccagagccttgagatagagtcctctgaagtcacggttatttttgggatttgccagtgcctttttcactgccggaagggtgttgtcgttgatcagaacgcgcttaacgggttttgtgttgcctgcatattccaggacctcatcgacaagtagctgtccttcgtcatctggatcgccagcatgaataatttcggtcacatcagcacgcctgataagctcaataatcgttttaacctgtttttcggcgctttctacaggctggtattttacgggataaagacgcaaagggagtgtttcaatcttccactctttgtattcaggattatagttttcggggggctgtgattcgataatatgaccaaaacagttagtcacaatagtattatcactttcaaaccagccatcatgacgggtaaaattgccaccaagcgccttaacaatatcattcgctactgcgggtttttctgcgataaaaagtctcatcttattatcctttaaataactaatgcactttcaatagaaggttgtcttttgaataaagagcaatctgtactcaatcgttcagactgaatagtgtgaagtaaaaggctttcttctctggacagaaggaagtcaccccattcgaactcttcccacacatcatgactgttttcaccaggtttatttaataaggactccattttgggctggattctggctggaggcttattttcataagctgaatgaaccctgtaactccacttatcaaaagaaccatttaaaagaatttcctgtgaaaccatatcaaaatcatcatcttctatataggtattgacttgatggtaaattaaccccatatcttcaatatcccaggtgtatatagtagtaaaccatcttaattttttatctgtttgcaaaacgaggccattaactgacttccttccttttcgcattccaacccataaacatttattaggccacggtctgcctacagacaatgattcactatcaattataaaatcaagctcaggtatggagatggatttaagagtgcatttattcgccatgcgatgaaaaagtttagggacaatatgtaggtacatatctatttcctttatctttatcgtagtcaaagaagttctgatttgttgacctcatggtaaacaagttcaccattgcgtattaaagataagtctttaatattgcgcaaaaataaaaagacagactcattagtatcattaataaaaaatgataaaaaactcaaccatttcaggtatattaaattttctgtgtacagttcttaataaaaattgacccgttgccacccagaaggcaaagaaacaaaccacgaacactgaattatcgagtaaatcgtataacgaatacatccagtgaccagcaggatatggcaaaccaaaagaagaatgcatttctttcccccattatgattttgaagtattcagcattagtattcatcttcataaggtagccaatcgtaatcgtttgtttgacatattaggggctattccatttcatcgtccaacaaaatgggtgcagtacatactcgttggaaatcaacacaggaggctgggaatgccgcagaaatatagattactttctttaatagtgatttgtttcacgcttttatttttcacctggatgataagagattcactgtgtgaattgcatattaaacaggagagttatgagctggcggcgtttttagcctgcaaattgaaagagtaagagtcttcggcgggaaattattcccgccttacttacggcgttgcgcattctcattgcacccaaatttattcttcacaaaaataataatagattttattacgcgatcgattatttatttcctgaaaacaaataaaaaaatccccgccaaatggcagggatcttagattctgtgcttttaagcagagattacaggctggttacgttaccagctgccgggcctttagcgccgctttcgatggtgaaggacactttctgaccttcgtccagagatttgtaaccatcgttctggatagcagagaagtgtacgaacacatctttagagccatcgtcaggagtgatgaagccgaagcctttgtcagcgttgaaccattttacgataccagtcattttaccggacatagtgtattacctttaataattaagtgtgcctttcggcgatatggcgtgctttacagattttgaagcgttaaaggaatgtgcactacgaggggtatcaacgataactcttgaagggacttgccttactacactgctttaatggtctgtacgtcaaaccgttgatgtgcattaagccacgcattggcgggtgatgcaacaattatttttcatatttatgattaatcggttggaaaacggtcctgtcatcaggaccgtaaacagcaataaagtggataaaagtctattccatcaactgcttacttaatgccgggttggcttgaatcaaacgcatcaattttagttcggcacttgaaggcttcacgcgtctggattcccattcctttaccatggcgactgatacgcccaaaacccgggcgaaatcatcgatttttaatcctgtcccttttcgtaactgctcaatttcggtacaggacgttgttctgtgcgtcagggtaattttctgcgtttcatctttaaaaacaatctgttccaggctgctcaacagctcatgcattggatctttatattccattgaaaactcctcaaatcacactgcgggatcgtgaattgcatcgaagctcattaagaatagtcgggaaaagcagacacagcggggtgaagtcagggcatgctctggctatgattcgattcagcctgtcatttagcgtgacttatagccacctaacgatctgataaatgccgatatatctcttaccactcctgttttgtaaagatttcgaaaatctaaccttctgcgaaggcgtaaatctctggctacaaaaaaggcaacggcactatcattttttaacaatgaaacaacaaattaaccttgtttcattttctccatgattttaccaggaagattacgtagaaagggtatcctgcaagcctgtcctggactatccttgtcacgtcagacacgcgtgtgtcgttgtgcgctttttttgggtgaaaggagtaagaaaatggcgacaggaaagtcctgctctcgctggtttgcgcctcttgcggcgttattaatggtagttagcctgagtgggtgttttgataaagaaggcgatcagcgtaaagcgtttatcgacttcctgcagaatacagtgatgcgtagcggtgaacgtctaccaaccctgactgccgatcagaaaaaacagtttggtccttttgtctctgattacgcgattctgtatggttattctcagcaggtgaatcaggcgatggattccggtctgcgcccggttgtagacagcgttaacgcaattcgcgtaccgcaggattacgttacgcaaagcggtccgctgcgtgaaatgaacggttcgctgggtgtgctggcgcaacaactgcaaaatgcgaagttgcaggccgatgctgcgcactctgcgctaaaacagagcgatgatttgaaaccggtctttgatcaggcattcaccaaagtggtaacgacgccagctgatgcattgcaaccgttgattccggcggcacaaactttcacgcaacaactggtgatggttggagactacattgctcagcaaggtactcaggtgagctttgtcgcaaatggcatccagttcccgacttcacagcaggcaagtgaatataacaaactgattgcgccattaccggcacagcatcaggcgtttaatcaggcctggactacagcagttactgcaacccaataaagagtaaaagcccgagcgattatcgggctttactctacgcagtcgcggcttagtccgcgacgtgcggattcacacagttcttctcaacctttccttgtaacgcatcaatcaaattatccacggcacaggcggccatgccataacgcgtctcatgggtggcagatccaatatgcggtactgcgacgacgttggccattgagagcaacggcgaatctacggacagtggctcttgttcgaagacatccagcccggcagcgtgaatttcgcctttctgcaatgctgcgatcagtgcattttcgtcaaccaccgggccacgtccggcattaatgaaaatggcggaggatttcattttggcgaattgttctgcgccaaacagatgatgcgtctcatcagttaacggcaggatcaggcaaacgaaatctgactcttgtaacagagtatccaaatcgcagtagcgggcgttgaagcgttcttctgcttctttatggtggcggcgcgcgttatagaggatgggcatgttgaagccaaagtgcgcacgttgtgccagcgccatgccgatccgtcccatcccgacaatgcccagtgttttatggtgaacgtcagtgccgtaccagtccgggcctatgctcgcggtccattcgcctgcttttacccgttctgctacctccacaacccgacgagcggtagacaacaccagcgccatcagcgtatcggcgacggtttctgttaatacggttggcgtgtgcatcagcagaatttttcgggcggtaagcgcatcgacatcaaaattgtcatagccgacggagatcgttgatgtggcacgcagtttcggcattttttccagcaatgcggcatttacattctcgtttgaacccagtaaaccttcagcttcggcaaaaattgctgcattttgttcgacggtttgtgggctgaggtttgccacctggtgaacggtgaaatgctcttgcaggcgttgcagtaaatcatcaggtaaggctttgtagaggataacggacggcttcatgcttctctccattcactgataaggcgatcaccttagcctgaaatatgatgaaggaaaactgaagaatgccaggtgatttctgcatcacctggcatgaaagggattacagcgggcttaaggtaatttctacacggcggttttgcgccttaccttctgcggtgctgttgctggcgattgggttagccgggccaaggccctgagtacggatgcggctggcgtccacgccctgggtgatcaacgcgctggcaacggaatccgcacgttgctgggagagacgcatgttcaggtcgtgaccacccgtgctgtcggtataaccaatcacgttaaccgccgttttcggatactctttcagtaccattgccacgccggtcagggtgttagcgcccgccggtttcagggtcgcgctgctgctgtcgaaggtcacattgttcggcatattgaggataatgttatccccgctgcgggttacgctaacaccagtgccgcgcattttgtcgcgcagcttcgcttcctgcacatccatgtaataaccaacgccgccgcccagagctgcgcctgctgctgcgccaatcagcgcgcctttaccgcgatctttcttcgaagaagagagcgcaccaatacccgcgcccacgagagagcccagacctgcgccgatagcagatttacctgcttcgcgttcgccggtgtaagggttagttgtgcagccagataccgccagagcgccactcactacggcggcaataagataaacacgtttcttcattgttaatccttaataacctttttattctttgccacgggttccgtggcgggagattatgccgcgtgaacatgaagattattcctgggaatactcggaaatttgtaagtaatatttaactgctcaatacatctaacctttcaggagtcttcggtttggccaactcatcctcacgatattccgttctgactgccgcccattgggggcccatgctggttgaaaccgacggcgaaaccgtgtttagctcgcgtggcgcgttagccacaggaatggaaaactccttgcagagcgcggttcgcgaccaggttcacagcaatacgcgggtacgatttccaatggtgcgaaaaggctttcttgcgtcaccggaaaacccgcaaggcattcgtgggcaggatgaatttgttcgcgtgagttgggatgaggcgctggatcttattcaccaacaacataaacgcattcgtgaggcttatggtccggcatcgatttttgctggttcctacggctggcgttcaaacggcgtgctgcataaggcctcgacattattacaacgctatatggcgctggcaggcggttataccgggcatctgggggattattcgaccggcgcggcacaggcgatcatgccgtatgtcgtgggtggtagtgaagtttatcaacagcagaccagttggccgctggtgctggaacatagcgatgtcgtggtgctgtggagtgctaacccactcaatacgctgaaaattgcgtggaatgcatccgatgagcaggggctttcttacttttctgcactgcgtgacagcgggaaaaagctgatctgcattgatccaatgcgatcggaaaccgtcgatttctttggcgataaaatggagtgggtggcaccgcacatgggcaccgatgttgcgctgatgctggggatcgcccatacgctggtggaaaatggttggcacgacgaagcgtttctggcgcgttgcaccacaggttatgccgtcttcgcctcttatttgctgggcgagagtgacggaatagcgaaaaccgccgaatgggcagcagagatttgtggtgttggcgcagcgaaaatccgcgagctggcggctattttccaccaaaataccaccatgctgatggcaggctggggaatgcagcgccaacagtttggtgagcaaaaacactggatgatcgtcacgctggcagcaatgttggggcaaatcggcacacccggcggcggttttggtctttcttaccattttgccaatggtggtaaccccacgcggcgttctgcggtgctctcttccatgcagggcagcttgccgggtggctgcgatgcggtggataaaatccctgttgcccgcattgttgaagcactggaaaaccctggtggcgcatatcaacacaacggtatgaaccgacatttcccggatattcgttttatctggtgggcgggcggtgccaactttactcatcatcaggataccaatcgcctgatccgtgcctggcaaaaaccggagctggtggtgatctctgaatgcttctggacggcggcggcaaaacacgcggatatcgttctgcctgcgactacctcttttgagcgtaatgatctcaccatgaccggtgattacagtaatcagcatctggtgccgatgaagcaagtggtgccgccacgctatgaagcgcgtaatgattttgatgtttttgccgagttaagtgaacgctgggagaagggcggttatgcacgttttacggaaggaaaaagtgagctgcaatggctggaaacgttttataacgttgcccgacagcgcggggcaagccagcaggttgaattgccgccatttgctgagttctggcaagccaaccagttaattgagatgccggaaaacccggacagcgagcggtttattcgcttcgctgatttttgccgcgatccgctggcgcatccgttaaaaaccgccagcggcaagattgaaatcttctcacagcgtattgccgattacggttacccggattgccctgggcatccaatgtggctggagccggacgaatggcagggcaatgccgaaccagaacagttgcaggtactttctgcccatccggcgcaccgcctgcacagccagctgaattacagttctctgcgcgaattgtacgcggtggcaaatcgtgagcctgtcaccattcatcctgacgatgcccaggagcgcggcatacaagatggcgatactgttcggttgtggaacgcacgcgggcaaattcttgccggagcggtcattagcgagggaattaaacctggcgtgatttgcattcacgaaggggcatggccggatctggatttaaccgctgacggtatttgtaaaaacggcgcagtgaacgtgctgaccaaagatctccccagctcgcggctggggaatggctgtgcgggtaatacggcgctggcatggctggaaaaatacaacggtccggaactgacacttacagcgtttgaaccaccggccagctcataatccatgtgggtagttgggtttcatcctgccatgcgcaatcgacaatgtgaaaaccctgtgcctggtaaaaatttatcgccggttgatttttttgataaacctccagcatcaggtggggatggcgctgctgcacatactgcatcagcgccttaccaataccgcgcctgacggccttcggtgcgacaaacatcgctgccagaaatcggccttccataatgctgacaaaaccgagaagcttaccgtcttcttcccagacccagttttgcgcgttggcaagataggcatcccgcaccagcggaatgcagtcacgccagtaattcgcttttataaagggatgcccccaggttgtactttccagccacagttcgaggatcgcggggagttctgaacgttgcgcttcccgaatcatggtttatttcccggatagcaacagcagccaaccacatgatcattcaccagcccacatgcctgcataaaggagtaacagattgtggtgccgacaaacttaaaaccacgttttttcagtgccttagatagggcgtcggaggcggacgtagatgtgggaatttcgctcaacgttgtggcttgtgtcacctgtggctgatgatttacaaacgaccagacaaagtcgacaaacggttcgccgttctgttccatttgcaggtacgcccgcgcattaccaataattgcctgaattttccctcgatggcggataatcccggcgtcctgtaccagtctttcgacatcctcttcctgcattgctgcgaccttcaccggatcgaactgatgaaagcaggcgcgatagttttcgcgttttttgaggacggtgatccacgataatccagcctgctgcccttcaaggcagatcatttcgaacagttttttactgtcagtttcaggcacgccccactcattatcatggtaggcaatataaagcgggtcctgactcacccagccgcaacgttccatactttccctcgctatgtacccgatcgtaaaaatttcagccgcttttcttgacgcatcggtgaaaaagtcaatatttaatacagggctactatgcccgatatccttcatacaatgacaataatattgccgaattcggctcttccctggagtcgtgttaatgatcataaaaaaaagcggtggtcgctggcagctaagcctgctggcgagcgtggtaatcagtgccttttttctcaacacagcttacgcctggcaacaagaatatatcgttgatacgcaacccggactttccacagagcgttacacctgggatagtgatcatcaacctgattacaacgatattttgtcgcaacgtattcaaagtagccaaagggcgctgggactggaagtcaatctggcggaagaaacccctgtggatgtgaccagcagtatgagtatgggctggaattttcctttatatgaacaggttacaaccggcccggtcgcggcattacattacgatggcacaaccacctcgatgtataacgagtttggcgacagtactaccacgctgaccgatccgttatggcatgccagcgtgagtaccttaggctggcgtgttgactcccggcttggcgatctccgaccctgggcgcaaatcagctataaccagcaatttggcgagaatatctggaaggcgcaatcaggcctgagccggatgacggcgacaaaccagaacggcaactggctggatgtcaccgtaggcgctgatatgttgctcaatcaaaatattgccgcctatgccgcgctaactcaggcagaaaataccactaataatagcgactatctgtatacgatgggggttagcgccagattttaacgtaacagtcacaattgaaaccattaaataacaatagttgtggcgatagtgggtgctaacttaccaaataataaatttggtgaataattgtcgcgtcattcattcctgaactaaggcatttcattccgttctgatggcatttcatgccgtttttccccaggcataaagtgcacttcgttatggttgtcggcagagatttttcctttttattactgcaggaatactgccatgacaccttcaaattatcagcgtacccgctggctgacactcatcggtactatcattacccagtttgcgctggggtcggtttatacctggagcctgtttaatggcgcgctttccgccaagctggatgcgccggtaagccaggtcgctttctctttcggcttgttaagtctggggctggcaatttcgtcttctgttgcgggcaaattacaggaacgttttggcgttaaacgcgtcaccatggcttccggcattttgctgggattaggcttcttcctgacagcgcattctgacaacctgatgatgctgtggttaagcgccggtgtgctggtgggactggcagatggcgcgggttatctgctgacgctctctaactgtgtgaagtggttcccggagcgtaaaggtctgatctccgcgttcgctatcggttcttatggtctgggtagcctgggtttcaaatttatcgacacgcagctgctggaaacggtcggtctggaaaaaacctttgtgatttggggagcgattgcgctgttgatgattgttttcggcgcaacgttaatgaaagacgcaccaaaacaggaagtgaaaaccagcaatggtgtggtggagaaagattacacgctggcagagtcgatgcgtaaaccgcagtactggatgttagcggtaatgttcctgaccgcctgcatgagcggcctgtacgtgattggggtagcgaaagatatcgcccaaagtctggcacaccttgatgtggtttccgcagccaatgcagtcactgttatttccatcgccaacctttcaggtcgtctggtgctgggtattctgtctgacaaaatcgcccgtatccgtgttattaccattggtcaggtgatatcgctggtgggtatggcggccctgctgtttgcaccattgaatgcagtgacgttctttgcagcgattgcctgcgtggcatttaactttggcggcactattaccgtctttccgtcactggtcagtgagttctttggcctcaataacctggcgaaaaactacggtgtgatttatctcggtttcggtatcggtagcatttgtggttcgattatcgcctcactgtttggcggcttctatgtgaccttctacgtgattttcgccctgctgattctgtcattggcgctttctacgacgattcgtcagccagagcagaaaatgttgcgtgaggcgcatggctccctttaatgctcagccgcgagctactgggcttcagcttccgtgtgcatcaaacgcatcaacgaaatgtataaacaatgactcgtaaaatttgggccaattaactggccctttttactgctttttgtaacgctaaagtctcttttcaaacttgcatttttgtaaatttgtgcttcatgcacactctttccccacactttttccctttgctgtggtctacttattcgcgcgtgtagattttacttatctgactacctccgcactttttccctgccgggcctgaaaagccactaagcagggtgttatcacctgtttgtccagggtttgtttgcatgagatacatcaaatcgattacacagcagaagctgagctttttgcttgcaatctatattggcctttttatgaatggcgcggttttttaccgccgcttcggcagctatgcgcacgattttaccgtctggaaaggcatttctgctgttgttgaactggccgccaccgtactggtgaccttctttttactacgtcttctttcgctgtttggccgccgcagctggcgtattctggcatcgctggtggtgctcttttccgcaggtgccagctattacatgaccttccttaatgtggtcattggttatggcatcatcgcttccgtcatgaccaccgatatcgacctgtcaaaagaagttgttggtctgaactttattctctggttaatcgccgttagtgcattgcctcttatccttatctggaataaccgctgtcgctacaccttgctccgacaactgcgaaccccagggcagcgtattcgcagcctggcggtcgtcgtactggcgggtattatggtttgggcaccgattcgtttgctggatatccagcagaagaaagtggagagggcgaccggcgttgatttgccgagttatggcggtgtcgtagcgaactcttatctgccatcaaactggctttctgcgttggggctgtatgcctgggcgcgggtcgatgaatcttccgataataattcattgcttaatccggcgaagaaattcacttatcaggcaccgcaaaacgttgatgacacttatgtcgtgtttatcatcggtgaaaccacgcgttgggaccatatgggtattttcggctatgagcgtaataccacgccgaaactggcccaggagaaaaatctggcggcgttccgtggttactcctgtgataccgcaaccaaactctcactgcgttgcatgtttgtacgtcaggggggcgcggaagataatccgcagcgcacattaaaagaacagaacattttcgcggttctgaagcagttaggattcagttctgacctctacgctatgcagagcgaaatgtggttctacagcaacacgatggcggacaacattgcttatcgtgagcagattggtgcggagccacgtaatcgtggcaagccggtagatgatatgttgctggtagacgaaatgcagcaatcgctagggcgcaacccggatggtaagcatctgatcattctgcataccaaaggttcgcattttaactacacccagcgttatccgcgtagcttcgcgcagtggaagccggaatgtattggtgttgatagcggctgtaccaaagcgcagatgatcaactcctatgacaactcggtgacctatgtggatcactttatctccagcgtgattgatcaggttcgcgataagaaagcgattgtgttctacgcagctgaccacggtgagtcaattaatgaacgcgagcacctgcacggcacgccgcgtgaactggcaccgccggagcagttccgcgtaccgatgatggtctggatgtcagataaatatctggaaaatccggccaatgcgcaggcgtttgcgcagctgaaaaaagaagccgacatgaaagtgccacgccgtcacgtagagctgtacgataccatcatgggttgtcttggctatacttcaccggatggtggaattaacgaaaacaacaactggtgtcacatcccgcaggcaaaagaggcagcggctaactaagcggcctgctgactttctcgccgatcaaaaggcattttgctattaagggattgacgagggcgtatctgcgcagtaagatgcgccccgcattcggtgattggcgcagcctggtagcgcacttcgttcgggacgaaggggtcggaggttcgaatcctctatcaccgaccaaattcgaaaagcctgctcaacgagcaggcttttttgcatctgcagctcatgaggatgagaacctccgggggcagggaggttcgactcgagcgaagcgagagaacgttgcgccagcaacggcccgcagggcgagccacgaagtggcgagtaatcctctatcaccgaccaaattcgaaaagcctgctcaacgagcaggcttttttgcatctgcagctcatgaggatgagaacctccgggggcagggaggttcgactcgacgtaggcctgataagacgcgtcagcgtcgcatcaggcaaatgtgccggccattgtcggatgcggcgcgaccgccttattcgacctacacgacacacatttccctgccaaatttgcgccccatatctcactatccattaacggatttgtgacagaaaccattgtctttttttatatttgcttaaatctttttttgcgttacttatggctggccctggcattttccgctgtgcgttttagcgttcatggtattaatcgctcagatatccaccttttcctcagatttttttcattaaatgcataaaacttaatcaccaaatgttgctaaatattaagctgattgttctggtcatgttggagtagcacaaatttctctgctgcaaatagctgtttgaagtttttttaatctttgtttgtggattctcaccgttggtgtaaatcccggttggctgtattgacgttttcacattctgttgacagattgtaggtcacgaggggcattttatggaggatccgcactgttacactgatgttaattagtacggcatccccacctcataacgttgacccgaccgggcaaaaaacaaaaaaggtcaggcagcgacaacccactgcaaagggttaaaacaacaaacatcacaattggagcagaataatgcgtatttccttgaaaaagtcagggatgctgaagcttggtctcagcctggtggctatgaccgtcgcagcaagtgttcaggctaaaactctggtttattgctcagaaggatctccggaagggtttaacccgcagctgtttacctccggcaccacctatgacgcctcttccgtcccgctttataaccgtctggttgaatttaaaatcggcaccaccgaagtgatcccgggcctcgctgaaaagtgggaagtcagcgaagacggtaaaacctataccttccatctgcgtaaaggtgtgaagtggcacgacaataaagaattcaaaccgacgcgtgaactgaacgccgatgatgtggtgttctcgttcgatcgtcagaaaaacgcgcaaaacccgtaccataaagtttctggcggcagctacgaatacttcgaaggcatgggcttgccagagctgatcagtgaagtgaaaaaggtggacgacaacaccgttcagtttgtgctgactcgcccggaagcgccgttcctcgctgacctggcaatggacttcgcctctattctgtcaaaagaatatgctgatgcgatgatgaaagccggtacaccggaaaaactggacctcaacccaatcggaaccggtccgttccagttacagcagtatcaaaaagattcccgtatccgctacaaagcgtttgatggctactggggcaccaaaccgcagatcgatacgctggttttctctattacccctgacgcttccgtgcgttacgcgaaattgcagaagaatgaatgccaggtgatgccgtacccgaacccggcagatatcgctcgcatgaagcaggataaatccatcaatctgatggaaatgccggggctgaacgtcggttatctctcgtataacgtgcagaaaaaaccactcgatgacgtgaaagttcgccaggctctgacctacgcggtgaacaaagacgcgatcatcaaagcggtttatcagggcgcgggcgtatcagcgaaaaacctgatcccgccaaccatgtggggctataacgacgacgttcaggactacacctacgatcctgaaaaagcgaaagccttgctgaaagaagcgggtctggaaaaaggtttctccatcgacctgtgggcgatgccggtacaacgtccgtataacccgaacgctcgccgcatggcggagatgattcaggcagactgggcgaaagtcggcgtgcaggccaaaattgtcacctacgaatggggtgagtacctcaagcgtgcgaaagatggcgagcaccagacggtaatgatgggctggactggcgataacggggatccggataacttcttcgccaccctgttcagctgcgccgcctctgaacaaggctccaactactcaaaatggtgctacaaaccgtttgaagatctgattcaaccggcgcgtgctaccgacgaccacaataaacgcgttgaactgtacaaacaagcgcaggtggtgatgcacgatcaggctccggcactgatcatcgctcactccaccgtgtttgaaccggtacgtaaagaagttaaaggctatgtggttgatccattaggcaaacatcacttcgaaaacgtctctatcgaataattaaaagccatacaagactgatggcaaaggcaaaaatgcctgatgcgctccgcttatcaggcctacgaaaattctgcaatgtattgaatttgcacgattttgtaggccggataaggcgttaacgccgcatccggcataaacaaagcgcactttgtcaacaatctgtatacccggtggcgctgtgcctctgcgtgcagcgccatccggcagcaatacttcattccctgtccgataagggcgggaattgatttgtgagcaatacagacacgcagttccaggctgcgggtcactatagagaatccgggttatgttgcagtttattctccgacgtttgggactcgtcatccccacgtttatcggtattacccttctcacatttgcctttgtccacatgatcccgggcgatccggtgatgatcatggcgggcgaacgtgggatctccccagagcgtcacgcgcagctgctggctgaactcggcttagataaaccgatgtggcagcagtatctccattacatttggggcgttatgcatggcgatctaggcatttcaatgaaaagccgcatcccggtttgggaagagttcgtgccgcgcttccaggccacgctggaacttggcgtctgcgcgatgatttttgctacggcagtcggtattccggtcggcgtgctggctgcggttaaacgcggttccattttcgatcacacagcggttggcctggcgctgacaggttattcaatgcctatcttctggtggggcatgatgctgatcatgctggtttcggtgcactggaacctgacgcccgtctccggtcgcgtgagcgatatggtgttcctcgatgactccaatccgttaaccggttttatgctaatcgacaccgccatctggggtgaagacggcaactttatcgatgccgtcgcccatatgatcttgcctgccattgtgctgggtactattccgctggcggtcattgtgcgtatgacacgctcctcgatgctggaagtgctgggcgaggattacatccgcaccgcgcgcgccaaagggctaacccgcatgcgggtgattatcgtccatgcgctgcgtaacgcgatgctgccggtggtgaccgttatcggcctgcaggtgggaacattgctggcgggggcgattctgaccgaaaccatcttctcgtggcccggtctgggacgctggttgattgacgcactgcaacgccgcgactatccggtagtgcagggcggcgtattgctggtggcgacgatgattatcctcgtcaacttgctggtcgatctgctgtacggcgtggtgaacccgcgtattcgtcataagaagtaaggggacatcatgtcacaggttactgaaaataaagtgattagcgcaccggtgccgatgaccccgttacaggagttctggcactattttaaacgcaacaaaggcgcggtcgtcgggctggtttacgtcgtcatcgtgctgttcatcgcgatctttgccaactggattgcaccctataacccggcggaacagttccgcgatgcactgctcgccccgccagcctggcaggaaggcggcagcatggcgcacttgctgggcaccgatgacgtaggccgtgatgtgctgtcgcgcctgatgtacggtgcgcgcctgtcgctgctggttggctgtctggtagttgtgttatcgctgattatgggcgttattctcggcctgatcgccggttactttggcggcctggtcgataacatcattatgcgcgtggtcgatatcatgctggcgctgccaagtctgctgctggcgctggtgctggtggcaattttcggcccgtcgattggtaacgccgcgctggcactgaccttcgttgccttgccgcactatgtgcgcttaacccgcgccgccgtgctggtggaagttaaccgcgattacgtcaccgcgtctcgcgtggcgggtgccggggcgatgcgtcagatgtttattaacatcttcccgaactgccttgcgccgctgattgttcaggcgtcgctcggtttctctaacgccattctcgatatggctgctcttggtttcctcggcatgggggcacagccgccaacgcctgagtggggcaccatgctctccgacgtgttgcagttcgcgcaaagcgcctggtgggtcgtgaccttcccgggtctggcgatcctgctgacggtgctggcatttaacctgatgggtgacggtctgcgtgacgcgctcgatcccaaactgaagcagtaagaggttcgagatggcgttattaaatgtagataaattatcggtgcatttcggcgacgaaagcgcgccgttccgcgccgtagaccgcatcagctacagcgtaaaacagggcgaagtggtcgggattgtgggtgagtccggctccggtaagtcggtcagttcactggcgattatggggctgattgattatccgggccgcgtaatggcagaaaaactggagtttaacggccaggatttgcagcgtatctcagaaaaagagcgccgcaacctggtgggtgccgaagtggcgatgatcttccaggacccgatgaccagccttaacccgtgctacaccgtgggtttccagattatggaagcgattaaggtgcatcagggcggcaacaaaagtacccgccgtcagcgagcgattgacctgctgaatcaggtcggtattcccgatccggcatcgcgtctggatgtttacccgcatcagctttccggcggcatgagccagcgcgtgatgatcgccatggcgattgcctgtcggccaaaactgctgattgccgatgaaccgaccaccgcgctggacgtgaccattcaggcgcaaatcatcgaactactgctggagctacagcagaaagagaacatggcgctggtgttaattacccatgacctggcgctggtggcggaagcggcacataaaatcatcgtgatgtatgcaggccaggtggtggaaaccggtgatgcgcacgccatcttccatgcgccgcgtcacccgtatactcaggcattgctgcgtgcgctgccagaatttgctcaggacaaagaacgtctggcgtcgttgccaggtgtcgttcccggcaagtacgaccgcccgaacggctgcctgcttaacccgcgctgcccctatgccactgacagatgtcgcgctgaagaaccggcgctgaatatgctcgctgacgggcgtcagtccaaatgccattacccacttgatgatgccgggaggccgacactatgagtacgcaagaggccaccctgcaacaaccgctgttgcaggctatcgacctgaaaaaacattatccggtgaagaaaggcatgttcgcgccggaacgtctggttaaagcgctggatggcgtttcgtttaaccttgaacgtggcaaaacgctggcagtagtgggcgaatctggctgcggtaaatcgaccctcggtcggttgctgacgatgattgaaatgcccaccggtggcgagctgtattaccaggggcaggatctgcttaagcacgatccgcaggcgcagaagctgcgtcggcagaaaatccagatcgtcttccagaacccttacggttcgctgaatccgcgtaaaaaagtcgggcaaattcttgaagagccgctgctgatcaacaccagcttaagcaaagaacagcgtcgggaaaaagccctgtcgatgatggcgaaagtcggcctgaaaaccgagcactatgaccgctatccgcatatgttctccggcggtcagcgtcagcgtatcgccatcgcccgtggtctgatgctcgacccggatgtggtgattgccgatgaaccggtttccgcgctggatgtttcagtgcgcgcgcaggtgctgaatctgatgatggatttgcagcaggagttggggctgtcttatgtctttatctcccacgacctgtcggtggtggagcacattgctgatgaagtgatggtgatgtacctgggccgctgcgtggagaagggaacgaaagaccaaatcttcaataacccgcgccatccgtacactcaggcgctactttccgcgacgccgcgcctgaacccggacgatcgccgcgagcgcatcaagctcagcggtgaactaccaagcccactgaatccaccgccgggttgcgccttcaacgcccgctgtcgtcggcgcttcggcccctgcacccagttgcagccgcagctaaaagactacggcggtcaactggtagcttgttttgctgttgatcaggatgaaaatccgcagcgttaactcacaaaaccggggccatgcgctccggtttactcaatcagcttcaacagtggcgacaagcatagcaaaatgccgtacagcagaatcagccaggctttaaatccgcgaagtttttccagttgtgcgactttatagatcaggaaaaacggaatgaggcacgatacaataccatataacgggcttcccaactgaaagaacaccagcaccgatacacgaaacgaaacccaaatcgtcaacgtaatgacgataaaagcgcagatcgccagagtcagcacgcgtgagttaattttcttggtatcaataattcggcttaacagattgagaataatgcctttaatggcctcgtggaaaccgagataaatgccaaagaatgcggtcagtacggcaaagatattaagcaccgtagaggtgatatgaatgatatgcccagggatcacctgcgcggccagcgccagtgctgagatattttgttcaaaggcagaaacggcttcttcgtggctaattgagaaggtaaacgaaaaggcaaaaaacaggatcaccgcgatgagcgtgatataactaattcggtgggtacgcagcgcgagccgggttgccagtactttatccgcttcccgtttacgataggcaatattcattgggttaagtacctgaataaatactgcagaaaagaagcaaaatggaatggtaagcaagacatcgcggaaaaagacggaggcttgcgggaaggcggttatattggcgaaattccagtgcgggatcatcgcaaaaccgaacacgacaataatccctactttgaccaccaccattggcccggaaatcttaaacagtaatcgttcaccaccagacgcaatcgccaccagtacggcgaaaatagcgactttataaagtagagattgtgaaagatcggcatcggttaaaccgaaggttttcaggtacgaggcgctgtcgaaaaccacggagagagagtagataaaaatcccgtggataatcatcaaaaagtagataaccccgaggaaaattccccagttcttccccaggtaatgactgataatatcggtgtagtcattacaggaatcgctttcagaaagggtttttaaataaatgtcctgcactacccaggtggcaggataagcaatgatcgctgcggtaataaatacccaaattcccttcaagccaatttgtactggcatcagcacggttccggcaccaatcgccatgcctatgcataataaaacccagccgaagtcgtagcgtgtaaacggcaatttctgattgtgtttcgatagtgtgttgtgctgcataaagtcctgtccagaaagaagtcggcctcgcaaaaatgaataaacccagtttctcttgcgcaacaggtggagaagtcgaatacgcagtatgtaaaaaatgaggcaacagattcactggggaggtcgcgaggaggcgcaattctacaaaattgcgcatttcactaccagtctggagtcagcccggatatgaactgcaactattgcaaataaagaaattaagctggaaggcatcgcgcaatgaggaagattgccgggtgctgacagtaaaaagcaatcgtagaatcagcggcaagccggaaaggttccggtgaggcgcaatgttgcgggggctttatccctggtggcattggttgctggagagagaaaacccccgcacgttgcaggtatgcacctgacaacaccacgggggctaatcttgactctagaccactcaagaatagccgcgaaacgttgtcattacaacacaggcggctatatgacgttcgcagagctgggcatggccttctggcatgatttagcggctccggtcattgctggcattcttgccagtatgatcgtgaactggctgaacaagcggaagtaacgtgtcatgcgggcgtcaggctgccgtaatggcaatttgcgcccggaccaggccgcaggggggaaactctgcggcctttttcgttcttactgcgggtaaggcacccagtcgccgccgttcaggcgaacgtacggtttatcctggtattgaataactactgcatttgagttctcggagaccggtgctgtttgtggcaacccactggtgagttttttccagtcaacattgtcttcggtgaaaatcttgccatcgagaacgcgaaccaccagatcggagatagccaggaagctgctcggttgttcgatgacaatcggtgccccctgatgcggtgccttcatgccgaagaatttcaccccaacggggacgtcggtgatagacgggctagggatatcacgtaggccagatacctgcattctgtcgcccttcagcgcgccgccgtgttccggcaccacgaccaccatcactttacgacccgatttctcaagttcagtaaagaaggcgtccagttcatcaaagaatttctgcgcccgcgctttgtaatccgctgttttgctgacccccggataatggttgccgtcatgcagtggaagcgtgttgtagaacgtggcactacggctgtttttatctttttcggtaacgtccagccagcggttaagcacagcggtatcgtcataaaccggcgaaccatcaaagcccagcaaaataaccggcagatttgtttgatccatcaattcgctctgcatgccgccattttcgcgaacttctttcaaaaaaccgccgaactggccgttatgtcccatcatcaggtgctgggtaaagcccagtttcgaaaggttatcaaacagatagcagtcgttatttgccggttgatacagattagtgtgcgaagtctgcccgcagctggcgcgcagtaaacggatcgccgccgggccactgtaggaggtggcggagttaaagttcttgaactcaatatcgaaatgcgaccacagtggatgcgacatcaacccggcggcttctatatccgaccaggaaagcgaacagatgttaatcaccagtagttcaaatggctgagcatcagcgggcagcgaagacgggaaggtcgatttacgtttcgcctccgcgttatagaaattattcagccaggcgttaaggttcgccgttgttggcggtgcagtttgtgcgggcatatcacccactaccggtgcgccacccgtcgccgcaacggttgccgctgcgttaccacccgtcgttgttacagtggtcgtcggttgtccggctggccacaaggagaaacttggtcccgccagggtaagtacgttcagccatagcagtatggcaaccacaaaaacggtaatgcgaatccattgtgacaggaataaccaggccactaataaaacaaaaatggccccaatcatctgccagttaataaagcgtgtgacaaggtcgattaaataatcggtactgaaccccgccacctgcgaaccctggctcattatgctttccgggccaggcaaccaggtgtcatgccagaacaaagcaaagccgatcggcagggcaatccagtggcgcaagcgatgcaggctgtagcgcggaaggggcatcagcagaaacgcggcaaacaccaaattgaggagcggatggaagttaagatatcccgcccacaacaggccgaacttaaccagaaaatagaagttccagccggaaaggccgcgccagtattgccagagggaagaaggcatggcggtattttgcgtaaattgagtcattttttggttgccctggctttttccgtgcggcgtaacgtcccggccggtttaacataacgaggtttagcaaagaacaaacgtaaggtgtcgcgaatgcgtcgcaaagagtgccgcgccagatagcccagcgggaaaaatatcagtgcgcaaacgacaataatttcaatgatatcgctgatggtcatcatgatgagcgctccacagcatcatctaacagtcgcatgggttctggtattcgtcgccagtggcgaccatcgtgctcggcattgatgaccggtttagaactttgcgttaaaggcagcggcatgccccattgttctggggcaagcaagcgcatctgcaccagctcggcactgatttgatcatcttcaaaccagaccatacggtttgagaaaatgtcgccagtaggcaatgggaaaatatgattcaacgcggtatccagatcgttaatccgacagaatgagagaaacagcaccagccgattaccgccaatggtcatgatatcgccggtacggttagggcgacacagcgtcagggcttgttcaacgcggatacccggtaccggacgtagggcaaccagaacgcctttaccgtgggcaggtaatagagggttattcatcatgttgttgacggcattacagaacacatcccacttctggaaaccacgcagtttgagcggctgggtcattgacagcaaggtagtgatatcttccggcacatagcgactaaacttctgcccttgcacgctttcgatcatcgtcagacaacgggagagtggcgcattccacggaataaccatatttgcaccgcaggccaataacaaacgttcatcggtggcgcgcaggctagcggtattttcccgcacgaggattttcatcgcactaccgcgctggcgacgcagggtatgaatgctgcgggccagtggctcgatttgcgcattttgctgtaaagaaaagaccaccgtcgccgcctgagcggtacgggcttcattgaacaggacttcgttattgttgaacagttgccagtgttccgatagcggcggcgcaccttccagtacagcaacattactcagaatgcgtttttcgtcgctgcgtggttggatctccgcctcttcgctttgaactaatgtccagataccattttgttgctgaacgctaagctgctgacgggcgctgacccctttttcgttgcaccagaaggcaatatccagcaaatgttggtcaccctgaaaacgcaaactggcaagaccaaaaagtgaacggtattcctcaagcaacaatgaaaattgtttatcgttattatttccgggattaattaccaaaagcgaacaatggtttaacctgctccatttattcattttatccaaccatgagcgaagccgctcggcaggaatgttttgccatgcgttatttgcgcaaacaagaataaaaaggtaattatggggatcaatagaacactgcaaatcacgggtcaaatagtatagacctttttcatgatttagcattgaaaataattttattttttccggcccttgagaatcatctaattgaaagattttcgccggatcgctgtccatgctaatgaccgcgacgtgtgcggtttcagcctgggatgcaattgtttgattcgccagactgatagcatcttcatggcgatcgacgttaaaccaccagacgccgcctgctggcatatgtcgcagctcatcccataatgatgagataccgatagagaatacagggtccacaatgtccctcatgtcaccattttgtctgattatcagtttactagcgaaagctaagaaataaacctaccattgaaattaaaacttatcagatttagcatgtgaatcaatttagaaggtcacaagacgtgtgattttagtcttttcgtttttaactttttctgttgcgtaacggaaagtcaaaaagtgagcaaattcccgtctcgccgtaaacaataaaccggcgaaatgctcacggttagaattgtctcatgaacggtacggttatttcatagggatcaagcaaaatgaataacaatgaaccagatactctgcctgatcccgcgataggctatatcttccagaatgatattgtggcgttaaagcaggcattttcactgcctgatattgattatgccgatatttcccaacgcgaacagttggccgcggcattaaaacgctggccgttgctggcagagtttgcgcaacaaaagtaggggattggtgaatggccgtactgggattgcagggggtgcggggaggcgtggggacaacaaccatcaccgccgcattagcctggtcattacaaatgttgggagaaaatgtcctggtggtcgatgcctgcccggacaacttgttgcgcctgtcatttaatgttgattttacccaccgtcagggctgggccagagcgatgctggatggccaggactggcgtgacgctgggttgcgctacacctcgcagctcgatttgctgccttttggtcagttatccattgaagaacaagaaaatccacagcactggcaaacccggctgagcgatatttgctccggcttacagcaactaaaagccagcgggcgttaccagtggattttaatcgacttaccgcgtgatgcctcgcagataacccaccagctgctgagtttgtgcgatcactcgctggcaatcgtcaatgtggatgccaactgccatatccgactgcatcagcaagcgctgccggatggcgcacatattttgattaatgacttccgtattggcagtcaggttcaggacgatatttaccagctttggttgcaaagccagcgccgattactgccgatgctcattcatcgtgatgaagcgatggctgaatgcctggcggctaagcaaccagtaggtgaatatcgcagtgatgcgctggcggctgaagagatactgacgctggcgaactggtgcctgttgaactactccgggctgaaaacgccagtcgggagtgcatcatgagtatcctgacccggtggttgcttatcccgccggtcaacgcgcggcttatcgggcgttatcgcgattatcgtcgtcacggtgcgtcggctttcagcgcgacgctcggctgtttctggatgatcctggcctggatttttattccgctggagcacccgcgctggcagcgtattcgcgcagaacataaaaacctgtatccgcatatcaacgcctcgcgtccgcgtccgctggacccggtccgttatctcattcaaacatgctggttattgatcggtgcatcgcgcaaagaaacgccgaaaccgcgcaggcgggcattttcaggtctgcaaaatattcgtggacgttaccatcaatggatgaacgagctgcctgagcgcgttagccataaaacacagcatctggatgagaaaaaagagctcggtcatttgagtgccggggcgcggcggttgatcctcggtatcatcgtcaccttctcgctgattctggcgttaatctgcgttactcagccgtttaacccgctggcgcagtttatcttcctgatgctgctgtgggggtagcgctgatcgtacggcggatgccggggcgcttctcggcgctaatgttgattgtgctgtcgctgaccgtttcttgccgttatatctggtggcgttacacctctacgctgaactgggacgatccggtcagcctggtgtgcgggcttattctgctcttcgctgaaacgtacgcgtggattgtgctggtgctcggctacttccaggtagtatggccgctgaatcgtcagccggtgccattgccgaaagatatgtcgctgtggccgtcggtggatatctttgtcccgacttacaacgaagatctcaacgtggtgaaaaataccatttacgcctcgctgggtatcgactggccgaaagataagctgaatatctggatccttgatgacggcggcagggaagagtttcgccagtttgcgcaaaacgtgggggtgaaatatatcgcccgcaccactcatgaacatgcgaaagcaggcaacatcaacaatgcgctgaaatatgccaaaggcgagttcgtgtcgattttcgactgcgaccacgtaccaacgcgatcgttcttgcaaatgaccatgggctggttcctgaaagaaaaacagctggcgatgatgcagacgccgcaccacttcttctcaccggacccgtttgaacgcaacctggggcgtttccgtaaaacgccgaacgaaggcacgctgttctatggtctggtgcaggatggcaacgatatgtgggacgccactttcttctgcggttcctgtgcggtgattcgtcgtaagccgctggatgaaattggcggcattgctgtcgaaaccgtgactgaagatgcgcatacttctctgcggttgcaccgtcgtggctatacctccgcgtatatgcgtattccgcaggcggcggggctggcgaccgaaagtctgtcggcgcatatcggtcagcgtattcgctgggcgcgcgggatggtacaaatcttccgtctcgataacccgctcaccggtaaagggctgaagtttgctcagcggctatgttacgtcaacgccatgttccacttcttgtcgggcattccacggctgatcttcctgactgcgccgctggcgttcctgctgcttcatgcctacatcatctatgcgccagcgttgatgatcgccctattcgtgctgccgcatatgatccatgccagcctgaccaactccaagatccagggcaaatatcgccactctttctggagtgaaatctacgaaacggtgctggcgtggtatatcgcaccaccgacgctggtggcgctgattaacccgcacaaaggcaaatttaacgtcaccgccaaaggtggactggtggaagaagagtacgtcgactgggtgatctcgcggccctacatcttccttgtcctgctcaacctggtgggcgttgcggtaggcatctggcgctacttctatggcccgccaaccgagatgctcaccgtggtcgtcagtatggtgtgggtgttctacaacctgattgttcttggcggcgcagttgcggtatcggtagaaagcaaacaggtacgccgatcgcaccgcgtggagatgacgatgcccgcggcaattgcccgcgaagatggtcacctcttctcgtgtaccgttcaggatttctccgacggtggtttggggatcaagatcaacggtcaggcgcagattctggaagggcagaaagtgaatctgttgcttaaacgcggtcagcaggaatacgtcttcccgacccaggtggcgcgcgtgatgggtaatgaagttgggctgaaattaatgccgctcaccacccagcaacatatcgattttgtgcagtgtacgtttgcccgtgcggatacatgggcgctctggcaggacagctacccggaagataagccgctggaaagtctgctggatattctgaagctcggcttccgtggctaccgccatctggcggagtttgcgccttcttcggtgaagggcatattccgtgtgctgacttctctggtttcctgggttgtatcgtttattccgcgccgcccggagcggagcgaaacggcacaaccatcggatcaggctttggctcaacaatgatgataacgcgatgaaaagaaaactattctggatttgtgcagtggctatggggatgagtgcgttcccctctttcatgacgcaggcgacgccagcaacgcaaccactgatcaatgctgagccagctgtagccgcccagacggaacaaaatccgcaggtggggcaagtgatgccgggcgtgcagggcgctgatgcgccagtcgtggcgcagaacggtccttcgcgtgatgtgaagctgacctttgcgcaaattgcaccgccgccgggcagcatggtgctacgtggcattaacccgaacggcagcattgagtttggtatgcgcagcgatgaagtggtgacgaaggcgatgctcaacctcgaatacaccccatcgccatcgttactgcctgtccagtcgcagttaaaggtttatctcaatgatgaactgatgggcgtgctgccagtgaccaaagaacagttgggtaaaaaaacgctggcgcaaatgcccattaacccactgtttattaccgacttcaaccgtgtacggctggagtttgtcggccattatcaggacgtgtgcgaaaacccggccagcaccacgctttggctggatgttgggcggagcagtggactggatctgacctatcagaccctgaatgtgaagaatgacctgtcacacttcccggtgccattctttgacccgcgcgataaccgcaccaacaccttgccgatggtctttgcgggtgcgccggatgttgggctgcaacaagcctctgccattgtcgcctcgtggtttggttcgcgttctggctggcgtgggcagaacttcccggtactctataaccaactgccggatcgcaatgccattgtctttgcaaccaacgacaaacggccggacttcctgcgcgatcatccggcggtaaaagccccggtgattgagatgattaaccatccgcagaatccttacgtcaaactgctggtggtgtttggtcgtgacgacaaagacctgttgcaggcagcgaaaggtatcgctcagggtaacattctgttccgtggtgaaagcgtggtagtgaatgaagtgaaaccgctgctaccgcgtaagccgtacgatgcgccgaactgggtacgtaccgatcgtccggtcacatttggcgaactgaaaacctatgaagaacagttacaatccagcggtcttgagccagcagcgattaacgtttcgctaaacctgccgccggatctctacctgatgcgcagtaccggcattgatatggatattaattaccgctacaccatgccgccggtgaaagacagttcgcggatggatatcagcctgaataaccagttcctgcaatccttcaacctgagcagcaaacaggaggcgaaccgcctgctgctgcggattccggtattacaaggtttgctggatggcaaaacagatgtctctattccggcgctgaaactgggcgcgaccaaccagctgcgcttcgactttgagtatatgaacccgatgccgggcggttcggtggataactgtattaccttccagccggtgcagaatcatgtggtgattggtgacgactccaccatcgacttctcgaagtattaccacttcatcccgatgccggatctacgcgcctttgctaacgcgggcttcccattcagccggatggcggatctgtcgcaaaccatcaccgtgatgccgaaagcgcctaacgaagcacagatggaaacgttgctgaatactgttggttttatcggcgcacagacgggcttcccggcgattaatctgacggtgaccgatgatggcagcaccattcagggcaaagatgccgacatcatgatcatcggtggtatcccggacaaactgaaagacgataagcagatcgacctattggtgcaggcgaccgaaagctgggtgaaaacaccgatgcgccagaccccgttccccggcattgtgccggacgagagcgatcgcgcggcagaaacccggtcaacgctgacctcttccggtgcgatggcggcggtgattggcttccagtcgccgtataacgaccagcgcagcgtgattgcgctgttggcagatagcccacgcggttatgaaatgcttaacgatgcggtgaacgatagcggcaaacgcgccaccatgttcggttcggtcgcggtgatccgcgagtccggtatcaacagcctacgtgttggcgacgtttattacgtaggtcatctgccgtggttcgagcgcgtgtggtatgcgctggcaaaccatccgattctgctggcggtgctggcggctatcagtgtgatattgctggcatgggtactgtggcgtctgctgcgaattattagtcgtcgtcgtcttaacccggataacgagtaattgaagatgaatgtgttgcgtagtggaatcgtgacgatgctgctgctggctgcctttagtgttcaggcagcctgtacctggcctgcctgggagcagtttaaaaaggattacatcagtcaggaagggcgcgtcatcgaccccagcgacgcgcgcaaaatcaccacctccgaagggcaaagttacggcatgttctctgccctggcggctaacgaccgtgcagctttcgataatattctcgactggacgcagaacaatctcgctcagggttctttaaaagaacgtttgcccgcctggctgtggggcaagaaagagaacagtaagtgggaagtgctggacagcaattcggcctccgatggtgatgtctggatggcctggtcgttgctggaggcggggcgtttgtggaaagagcagcgttataccgacatcggcagcgcgttgctaaaacgtatcgcgcgggaggaagtggtgacggtgcctgggctgggttccatgttgttaccgggcaaagtgggttttgctgaggataacagctggcgttttaaccccagctacctgccgccgacgctggcgcagtatttcacccgctttggcgcgccgtggaccacgctgcgcgaaaccaatcaacgtttattgctggaaaccgccccgaaaggtttttcgccagactgggtgcgctatgagaaagacaaaggctggcagctaaaagccgaaaaaacattgatcagcagctacgacgctatccgcgtttacatgtgggtaggcatgatgcctgacagcgatccgcaaaaagcgcggatgctcaaccggtttaaaccgatggcgacattcactgagaaaaacggttatccgccggaaaaagtggatgtggctacggggaaagcgcagggtaaaggaccagtcggtttttctgccgccatgctgccctttttacaaaaccgcgatgcgcaggccgttcagcgccagcgcgtggccgataactttcccggcagcgatgcctattacaactatgtgctgaccctgtttggacaaggctgggatcaacaccgtttccgcttctcgacaaaaggtgagttattacctgactggggccaggaatgcgcaaattcacactaaacatattcacgctttccctcggtctggccgtcatgccgatggtcgaggcagcaccaaccgctcagcaacagttgctggagcaagttcggttaggcgaagcgacccatcgtgaagatctggtgcaacagtcgttatatcggctggaacttattgatccgaataacccggacgtcgttgccgcccgtttccgttctttgttacgtcagggcgatattgatggcgcgcaaaaacagctcgatcggctgtcgcagttagcgccgagttcaaatgcgtataaatcgtcgcggactacgatgctactttccacgccggatggtcgtcaggcactgcaacaggcacgattgcaggcgacgaccggtcatgcagaagaagctgtggcgagttacaacaaactgttcaacggtgcgccgccggaaggtgacattgctgtcgagtactggagtacggtggcgaaaattccggctcgccgtggcgaagcgattaatcagttaaaacgcatcaatgcggatgcaccgggcaatacgggcctgcaaaacaatctggcgctattgctgtttagtagcgatcgccgtgacgaaggttttgccgtcctggaacagatggcaaaatcgaacgccgggcgcgaaggggcctctaaaatctggtacgggcagattaaagacatgcccgtcagtgatgccagtgtgtcggcgctgaaaaaatatctctcgatctttagtgatggcgatagcgtggcggctgcgcaatcgcaactggcagaacagcaaaaacagctggccgatcctgctttccgcgctcgtgcgcaaggtttagcggcggtggactctggtatggcgggtaaagccattcccgaactacaacaggcggtgcgggcgaacccgaaagacagtgaagctctgggggcgctgggccaggcgtattctcagaaaggcgatcgcgccaatgcagtggcgaatctggaaaaagccctcgcactggacccgcacagcagcaacaacgacaaatggaacagtctgctgaaagtaaaccgctactggctggcgatccagcagggcgatgctgcgctgaaagccaataatcctgaccgggcagaacgcctgttccagcaggcgcgtaatgtcgataacaccgacagttatgcagtgctggggctgggcgatgtggcgatggcgcgaaaagattatcccgccgccgaacgttattatcagcagaccttgcgtatggacagcggcaacactaacgccgtgcgcgggctggcaaatatttaccgccagcaatcgccagaaaaagctgaagcgtttatcgcctcgctctctgccagtcagcggcgtagcattgatgatatcgaacgcagcctgcaaaacgaccgtctggcacagcaggcagaggcactggaaaaccagggcaaatgggcgcaggcggcagcacttcagcggcaacgactggcgctggaccccggcagcgtatggattacttaccgactttcgcaggatctctggcaggccggacaacgcagccaggccgatacgttaatgcgcaatctggcgcagcagaagtcgaacgacccggagcaggtttacgcttacgggctgtacctctctggtcatgaccaggacagagcggcgctggcgcatatcaacagcctgccgcgtgcacagtggaacagcaatattcaggagctggttaatcgactgcaaagcgatcaggtgctggaaaccgctaaccgcctgcgagaaagcggcaaagaggcagaagcggaagcgatgctgcgccagcaaccaccttccacgcgtattgacctcacgctggctgactgggcgcaacaacgacgtgattacaccgccgcccgcgctgcatatcagaatgtcctgacgcgggagccagctaacgccgacgccattcttggtctgacggaagtggatattgctgccggtgacaaagcggcggcacgtagccagctggcgaaactgcccgctaccgataacgcctcgctgaacacacagcggcgcgtggcgctggcacaggcgcagcttggcgataccgcagcagcgcagcggacgtttaataagttgatcccgcaggcaaaatctcagccaccgtcgatggaaagcgcgatggtgctgcgtgatggtgcgaagtttgaagcgcaggcgggcgatccaacgcaggcgctggaaacctacaaagacgccatggtcgcatccggtgtgactacgacgcgtccgcaggataacgacacctttacccgactgacccgtaacgacgagaaagatgactggctgaaacgtggcgtgcgcagcgatgcggcggacctctatcgccagcaggatcttaacgtcacccttgagcacgattactggggttcgagcggcaccggtggttactccgatctgaaagcgcacactaccatgttgcaggtggatgcgccgtattctgacgggcggatgttctttcgcagtgatttcgtcaatatgaacgtcggcagtttctccactaatgccgatggcaaatgggatgacaactggggcacctgtacattacaggactgtagcggcaaccgcagccagtcggattccggtgccagcgtggcggtcggctggcgaaatgacgtctggagctgggatatcggtaccacgccgatgggcttcaacgtggtggatgtggtcggcggcatcagttacagcgatgatatcgggccgctgggttacaccgttaacgcccaccgtcggcccatctccagttctttgctggcctttggtgggcaaaaagactccccgagcaataccgggaaaaaatggggtggcgtacgtgccgacggtgtggggctaagtctgagctacgataaaggtgaagcaaacggcgtctgggcatcgcttagtggcgaccagttaaccggtaaaaatgtcgaagataactggcgcgtgcgctggatgacgggctattactataaggtcattaaccagaacaatcgccgcgtcacaatcggcctgaacaacatgatctggcattacgacaaagatctgagtggctactcactcggtcagggcggttactacagtccgcaggaatacctgtcgtttgccataccggtgatgtggcgggagcgcacggaaaactggtcgtgggagctgggtgcgtctggctcgtggtcgcattcacgcaccaaaaccatgccgcgttatccgctgatgaatctgatcccgaccgactggcaggaagaagctgcgcggcaatccaacgatggcggcagcagtcagggcttcggctacacggcgcgggcattacttgaacgacgtgttacttccaactggtttgttggcacggcaattgatatccagcaggcgaaagattacgcacccagccatttcctgctctacgtacgttattccgccgccggatggcagggtgacatggatttaccgccgcagccgctgataccttacgccgactggtaagttttcagatagcgcctctcttaatgccgctgcgatcgggtatactcgggcggcaatctgggatttccggggggagacaatttgcgcgtaagtcgctcgttaacaatcaagcagatggcaatggtggcagccgttgtcctggtgttcgtttttattttttgcaccgttttgctgttccatctggtccagcagaatcgctataacacggctacgcaactggaaagcattgctcgctctgtccgcgaacccttatcttcagctattttgaaaggcgatattcccgaagcggaagctattcttgccagcattaaaccggcaggcgtggtcagccgtgccgatgtagtgctgcctaaccagttccaggcgctgcgtaaaagttttattccagagcgcccggtgccggtaatggttactcgcctgtttgagctaccggttcaaatctcgctgggcgtttactcgctcgaacgtccggcaaacccgcagccaattgcctatctggtactacaggcggattccttccgtatgtataagttcgtgatgagcaccctctcaacgttagtgaccatttacttacttttgtcgcttatcctgaccgtcgccatcagctggtgcattaaccgcctgattttgcatccgttacgcaatattgctcgcgaacttaacgccatcccagccaaggagcttgttggtcaccaactggcattaccgcgtctgcatcaggacgatgaaatcggtatgttggtgcgcagttacaacctcaaccagcaattgctgcagcgccattatgaagaacagaacgaaaatgcgatgcgcttcccggtgtcggatttgccgaacaaagccttgctgatggagatgctggagcaggttgtcgcgcgtaaacaaaccaccgcgctgatgatcatcacctgtgaaaccctgcgtgatactgcgggcgtgctgaaagaggcgcaacgagaaattctgctgctgacgctggtggaaaaactcaaatcggtactgtcgccacgtatgatcctcgcgcagattagcggttatgactttgctgtcattgccaacggtgtacaggaaccgtggcacgcaatcaccttaggtcagcaagtgctcactatcatgagcgagcgcctgccgattgaacgtattcaactccgtccgcactgtagcattggcgtggcgatgttctacggcgatctcaccgccgaacagctttacagtcgcgctatttctgcggcatttaccgctcgccataaaggcaagaatcagattcagttctttgatccgcagcagatggaagccgcccagaagcggttgacggaagagagcgatatccttaatgcactggaaaatcatcagtttgctatttggttacagccacaggtcgagatgaccagcggtaaactggtcagtgcggaagtgttactgcgtatccagcaaccggatggcagttgggacctgccggatggcttaatcgatcgcattgagtgctgtgggctgatggttaccgtcggtcactgggtgctggaagagtcctgtcgattgcttgcagcctggcaagagcgcggcattatgctgcccttgtcggtaaacctctctgcgctgcaactgatgcacccgaatatggtggcggatatgctggaactgttaacccgctatcgcattcagccgggaacactgattctggaagtgacagaaagccgacgtattgacgaccctcatgctgcggtggcaatcctccgtccgctgcgcaatgccggagttcgggtggcgctggatgatttcggcatgggctacgcagggctgcgtcagctgcagcatatgaaatcgttgccaatcgacgtactgaaaatcgacaaaatgtttgttgaaggcttgccgggagatagcagcatgattgctgcaattatcatgctggcgcagagcctgaacttacaaatgattgccgaaggcgtggagactgaagcacaacgcgactggctggcaaaagcgggcgttggtattgcccagggcttcctttttgctcgcccactccctattgaaatcttcgaagagagttacctggaagaaaagtagctaccccaaactgattacaaaactttaaaaagtgctggtttgtgcgagccagctcaaactttttaacctttttgtttcaattatgatccaggtacatttctgtgatgttgtctgggtgttattttaaggccgcaggtaccccataaccttacaagacctgtggttttactaaaggacaccctatgaaaacctctctgtttaaaagcctttactttcaggtcctgacagcgatagccattggtattctccttggccatttctatcctgaaataggcgagcaaatgaaaccgcttggcgacggcttcgttaagctcattaagatgatcatcgctcctgtcatcttttgtaccgtcgtaacgggcattgcgggcatggaaagcatgaaggcggtcggtcgtaccggcgcagtcgcactgctttactttgaaattgtcagtaccatcgcgctgattattggtcttatcatcgttaacgtcgtgcagcctggtgccggaatgaacgtcgatccggcaacgcttgatgcgaaagcggtagcggtttacgccgatcaggcgaaagaccagggcattgtcgccttcattatggatgtcatcccggcgagcgtcattggcgcatttgccagcggtaacattctgcaggtgctgctgtttgccgtactgtttggttttgcgctccaccgtctgggcagcaaaggccaactgatttttaacgtcatcgaaagtttctcgcaggtcatcttcggcatcatcaatatgatcatgcgtctggcacctattggtgcgttcggggcaatggcgtttaccatcggtaaatacggcgtcggcacactggtgcaactggggcagctgattatctgtttctacattacctgtatcctgtttgtggtgctggtattgggttcaatcgctaaagcgactggtttcagtatcttcaaatttatccgctacatccgtgaagaactgctgattgtactggggacttcatcttccgagtcggcgctgccgcgtatgctcgacaagatggagaaactcggctgccgtaaatcggtggtggggctggtcatcccgacaggctactcgtttaaccttgatggcacatcgatatacctgacaatggcggcggtgtttatcgcccaggccactaacagtcagatggatatcgtccaccaaatcacgctgttaatcgtgttgctgctttcttctaaaggggcggcaggggtaacgggtagtggctttatcgtgctggcggcgacgctctctgcggtgggccatttgccggtagcgggtctggcgctgatcctcggtatcgaccgctttatgtcagaagctcgtgcgctgactaacctggtcggtaacggcgtagcgaccattgtcgttgctaagtgggtgaaagaactggaccacaaaaaactggacgatgtgctgaataatcgtgcgccggatggcaaaacgcacgaattatcctcttaatctcatcacttatgcccgcactcccttccccgagtgcgggtgtttgcgcataattgacccctgtgcctgaacttaccacctgggtgagttcaggtttatttcacttcttccgtgacattttcatgttcttgcggtctaacacgaagtgtttttaacgtcatttagactgaccgacaacgggcagtttttttattaccaggatagttgatcaggggttcacatgcagggcacaaaaattcgacttttagcgggcggtttgctgatgatggccactgctggctatgtgcaggcagatgcgctccagcctgatccagcatggcaacaggggacgctttccaacggtttacagtggcaagtgctgaccaccccccagcgtcccagcgatcgtgttgaaattcgcctgctggttaataccggttcgctcgccgaaagtacacaacagagcggttacagtcacgccatccctcgtattgcgctaacgcaaagcggtggccttgacgcagcacaggcgcgttcattgtggcagcaggggatcgaccctaaacgcccgatgccgccggtaattgtctcttatgacaccacgctgtttaatctgagtttgcccaataaccgtaacgatttgctgaaagaagcgctctcttatctggcaaatgccactggcaaattgaccatcacaccagaaaccatcaaccacgcgctgcaaagtcaggacatggtggcaacctggcctgccgatactaaagagggctggtggcgctatcgtctgaaagggtcaaccttgttaggtcacgatcctgccgatccgctgaaacaacccgttgaagcggaaaaaattaaagatttctatcagaaatggtacaccccggatgcaatgacgctactggtggtgggaaacgtggatgcgcgctcggttgtcgaccaaataaacaaaacgtttggcgaactgaaaggcaaacgtgaaacgccagctccggtgccgacgctttctccgctgcgtgcggaagcggtgagtattatgactgacgcggtgcgtcaggaccggttatctatcatgtgggatacgccgtggcagccgattcgtgaatcagccgcactgctgcgctactggcgtgcggacctggcccgcgaggcgctgttctggcatgttcagcaagcgttaagtgccagtaacagcaaagacatcggtcttggatttgactgccgtgtgctgtatctgcgtgcgcagtgtgccatcaacatcgaatcaccaaacgacaagctgaacagcaaccttaatctggtggcgcgtgaactggcgaaggttcgcgataaaggtctgccggaagaagagttcaatgcgttagtggcgcaaaagaaactggagctgcagaaactgtttgccgcctatgcacgagctgataccgatattctgatgggtcagcggatgcgttcgttgcaaaatcaggttgtcgatatcgcgccggagcaatatcagaaactgcggcaggatttccttaatagcctgacggtagagatgttaaatcaggatctgcgtcaacagttgtcgaatgatatggcgttaatactgctgcagccgaaaggcgagccggaatttaacatgaaagcgttgcaggcggtctgggatcaaatcatggccccatctaccgccgctgcgaccacctctgtcgccacggatgacgtacatcctgaagtgacggatattccacctgcacagtaatgcctgatggtgatgagttagcacaaccatcaggtatttatggatgagctggatagaggggtaacactttatccagccttttgcatatgctgcgtttacgctggcatcgcctcacgcgggataatcgcgccgcgatactgaataacggtacttgcggtcaggtgcccacgtttcgccgcgtcttccgcgctgccgcctgtcagacgtaccgccagataaccggcactgaaagagtcgccagctgcggtggtatcgatcactttttctttcggcagtttcaccgccggaacatccactaacccttcgccagcaatggacaccaggcaagaatccgccccgcgtttcaccaccacttctttcacgcccgcgttatgggtgcgcgcaatgacgtcttccaccggctgttgaccccacagcgcgtcttcgtcgtccagcgtcaggaaggcgatatccgtgcattccagcatttgttggtacacctgctgtgtctcttctttgctggcccacaggcgcggacgatagttattgtcgaaaatcacttttccgccgttggcgcggcattcgcgcagcagggaaagcagcttttcgcggctggtcgggcttaagatcgccaggctaatcccgctcaggtagagataatcgaaattcgccagctcttcgcaaatcgccgcagactgctcactctccagccagaatttggcggcggcttcgttccgccagtagtagaacgtacgctcgccggtgctgtcggtttcaatgtagtaaaggcccggcagacggttttccatccgttgggtcagggaagtatcaacgttctcgccgtgccaggcgtccagcatctgctggctaaaactgtccgttcccagcgccgttacgtaatgaacggttaatgccgcaggatcgacctgacgggcgatatagacggaagtgttcagggtatcgccgccgaaaccgcgcttaacgtccgcgcctttctcggaaagctcaatcatgcattcgccaatcacggcaatctttttggacatagtcgtgaacctgatctgtaaaaaattagcgttagtttgcgctgtggtggtttgctggtcaaccatattaaaacagtgttccattatttttttgagccagaacgtattcctgaaagattccgttgtggagtgaggaaatttaccccggccaggcggtaaagttctgcccttacgcgccgataatctttgtcgagtccgggcagcatcacttttaaacacaggacatctttgatgataaggcaggttatccagcgaataagcaaccctgaagcaagcatcgagagcttgcaggaacggcgtttttggttgcagtgtgagcgtgcttacacctggcagccgatctatcaaacatgcgggcggttaatggccgtggagctattaacggtggtcacgcatcccttgaacccttcgcaacgcctgccgccggatcgctattttactgaaatcaccgtcagccatcggatggaggttgtgaaagagcagattgatttgctggcgcaaaaagccgacttctttatagagcacggcctgctggcatcggtcaatattgatggccctacgctcatcgccctgcgtcagcaaccaaaaatcctgcgccagattgagcgtcttccctggctgcgtttcgaactggtggagcatatccgtctgccgaaagattcaacctttgcctcgatgtgtgaatttggcccgctgtggctggatgattttggtaccgggatggcaaatttctctgcgctaagtgaagtgcgttatgactacatcaaaatcgcgcgagaactgtttgtgatgctgcgtcagtcgccggaaggacgcacactcttttctcagcttttacatctaatgaatcgctattgtcgcggggtgattgtcgagggcgtagaaacgccggaagagtggcgtgatgttcagaactcgcccgcattcgccgcacaaggctggtttctttcacgcccggcaccgatagaaacgctgaatacggcggttctggcgctataagctgcctcattttccgcctggctggactatctttaggactggcacaggaagaatatgaggaagcgaacgatgagcaaggcaggcaaaataaccgctgcgatttcaggggctttcttgttgttgattgtcgtggcgatcattttgattgcaacttttgactggaatcgactcaaaccgactatcaaccagaaagtctctgcggagttgaatcgtccgttcgctatccgtggcgatctgggcgtggtgtgggagcggcaaaaacaagaaactggctggcgcagctgggtgccgtggccccatgtacacgcggaagacatcattcttggcaatccaccggatattcccgaagtcacgatggtgcatttgccacgcgtagaggcaacgctggccccgctggcgctgctgaccaaaacggtctggctgccgtggatcaagctcgaaaagcccgacgcgcgcctgattcgcctctctgaaaagaacaataactggacgtttaatcttgccaacgatgataacaaagacgcgaatgcaaagccgtcggcatggtcgtttcggctggataatattcttttcgatcaagggcggatcgccattgatgacaaagtaagcaaagcggatctggagatttttgttgatcccttaggcaagccgctgccgttcagcgaagttactggatcgaaaggtaaagcggataaagaaaaggtgggcgattacgtttttggcctgaaggcgcagggacgatataacggtgaaccgctcacgggtacgggaaaaataggcggtatgctggcgctgcgtggcgaagggacgccgtttccggtacaggctgatttccgctctggtaacacccgtgttgcttttgatggcgtcgtgaatgacccaatgaagatgggcggtgtcgatttacggcttaaattttctggcgattcactgggtgatctctatgaactgacgggcgttctgctgcccgataccccgccgtttgaaacggatggtcggctggtagcgaaaatcgacactgaaaaatcgtcggtctttgattatcgcggttttaatgggcgaattggtgatagcgatatccacggttctctggtctacaccaccggaaagccacgaccaaaactggaaggtgatgtcgagtcgcggcaattgcggctggcggacctgggaccgttgattggcgttgattccgggaaaggggcagaaaagtcgaaacggtctgaacagaagaagggcgaaaaaagcgttcagcctgcgggcaaagtgctgccttatgaccgcttcgaaaccgataaatgggacgttatggatgccgatgttcgcttcaaagggcggcgcattgagcatggcagtagcctgccgattagcgatctttctactcatatcatcctcaaaaatgctgacctgcgcctgcaaccgctgaaatttggcatggcgggcggcagcattgcggcgaatattcatctggaaggcgataaaaagccgatgcaggggcgggcagatattcaggctcgtcgactgaaactgaaagaactgatgcccgatgtggaactgatgcagaagacgctgggggaaatgaacggtgacgcggaactacgcggtagcggtaactcggtggcggcacttttaggcaacagtaacggcaacctgaaactgttgatgaatgacgggctggtgagccgcaacctgatggagattgttgggctgaatgtcggcaactacattgtcggtgcgatatttggtgatgatgaggtgcgggtgaactgcgcggcggcgaatctgaatattgccaacggcgtggcgcgcccgcagatttttgctttcgatactgagaacgcgttgattaatgttaccggcacggcaagttttgcttcggaacagctggatttgactattgatccggagagtaaaggaattcggattatcacactgcgttcgccgctgtatgtgcgggggacgtttaaaaatccgcaggctggggtgaaagccggaccgctgattgcccgtggtgctgttgctgcggcactggcaacgctggtaacaccggcggcggcgttactggcactgatctcaccttccgaaggggaggctaatcagtgtcggacgattttgtcgcagatgaagaagtgatgataattgccggatgtctgacatccggcaattaaacagatttagattgttggcaaagtgtgctttgttcatgccggatgcggcgtgaacgccttatccggcctacaaatccttgcgaattcaatatattgtatggaaattcaggcctgataagcgtagcgcatcaggcttttcactcttattacaacgactgatgtcgcgtctcatgggtcagcagcagggcgattaacgtcaagccagccatcgccgccagatataaccccaccgcacctagcccgtagttagtctgcaaccaggctgcgatatatggcgcaacggaagccccgagaatcgacgctacgttgtaagagaacgatgctccggtgtaacgcacttctgtcggaaacagctctggtaacagcgcacccattggcccgaaggtcagacccatcagacttaaccccagcagcaggaaggcaaaaaccagaatcgggttgccagaaccgagcagtgggttaaaggcgaacagcgcgaacaggatgatcagcgtggtgatgattaccatgcttttacggcgaccaaaggcatcagccagtaatccagcgactggcaccatcacgccaaaaccaataactgccatcatcaacatccacaacacttcgttacgcggcaggccaagcccaactggcgcggcggcggtactaaaggtcatagagtagaccgtcatgatgtaaaacagcgtataggttgccagcataatgaacgtacccagtacggttacgcgaacatgtttggtcagcagcgtacccagcgggatcttcacctgttttttcgctttagcgactttctcaaacaccggcgactcatgcagcgacacgcgaacatacaggccgataatgaccagcaccgccgagaagataaatggcacacgccagccccagctcataaactgctcgtcggtcagtagccaggaaagcagcaagaaagtgccattggcaaagaagaagccaatcggtgcgcccagctgcggaaaggagccatacagtgcacgtttgcgcggtggggcgttttcagtcgccagcagcgccgcgccgccccattcaccgcctaagcccagaccctgaccaaatcgagccagcgccagcagcagcggggcgaaaataccaatcgtggcatagcccggcagcagaccaatcaccacggtcgaaatccccatcgttagcaacgaggcgaccagcgtcgctttacgcccaacgcgatcgccaaaatgaccaaaaacggcagagccaatggggcgcgcgacgaaggcgatggcgaaggtggcgagcgactgtagcgttgctgccgtaggatcgccctgcgggaagaagatatgcggaaacacaataactgccgcagtggcgtaaatgtaaaagtcgaagaactcaatggctgtgccaatgagagaggcgacaaggactttattacgcgagttgatcggcgtgaattcttgctcgtggtcgagtgttgtggctgttgcttgcataatcttttcttattttttggctaacgaatagccatattacgcacagcaaaagtgatatttcaatgtgtaacaaatcgcggaaatggtcaaaaatcaggcaaaaaggggataatgtttaggccagtgatttttcttctatgaaatgcttcacataattttataaatagtggataaaactggtttcaggttaaataaaagttaccaactggatttatatgctggggttatgagttggaatgaaattgtttgctcccaaatagatggctgaagaggctctggggacgagtttcaagaggttatgtgcgcattatagccggatgcgatgctggcgcatcttatccggcctacggggagccaggccgaataaaatcgtatgccggataaggcgtttacgccgcatccggcctattttaaggctgcgttttccccggcattcgcgggtcgtctttatattcggcggtggcaatccacgccgcgcaaaacagcgtcaaacgggcgaagaagtagaaaaatgccatcagccccagcacggaaccaaatgctgcgccagagggggatttcatcaacgatggcagggtgtaggtcatcacgattttaatcacttcaaaaccaatagcagccagaaatgttccgcgaatcagggcttttttgcgcggacggtggcgcggcaaccgccagaagatccagaagaaaagcagatagttggcgaagatggaaatcgccaggccaatcaatcgccacgtcggtttcagccactcaatgctgttcaggtgcagggcgctaataatcatttgctgcgccgaaccggcaaccgaggtgatcgaaagcgtcacaatcagcgcaatcaacaaaccaatcagcgaaataaaatctcgcagatattttacccagaacttctcctgatcttgcggcgagcgttcccagacatcgcgcgactgggcacgaatcgcttcacgcaggttacccatccagttgatgccggaataaagtgccaccgccaggccgacaagccctacagtcgtacgctgctgaacggcggtgttgatggtgtttttcaacgtggcggctagcgtcggatcgctgatgttttgcagaattttgtcgaagatatcctgtagcaacatcggatgggaggccagcacaaagccccctgcggcaaacgacaccatcaaaattggtatcatcgacaaaaatgagaaataggtgatagccgcaccaaactggttacccagccgatcgttaaagcgttctgtcgcgcgaatcaggtgcgcaataaccggttggcgttggactttttcggcagtggtggtgacggtttccagcgcctggctaactttgctgcctttctcgctattatccaacggcttaatcggctcgtgctccagatcctggatgggacgtttgatctcgttttcctgcgtcatccgctcttttgtccttctgtcgtggtcattcttaaaaagtatagtcggtcagtccaggtactctttcattacgccagccagccactgcataaacaggtttacacgccgggaaagctcccgacgctgcggataaaccagcgaaagggagagcggctcggcacggtagccaggtaatacttcaataagccgcccggcacgcagggcttcgcgcacggcaatgcgcgggatctgaataatccccagaccggcaagaccggcggtgagatagttttcgctactgtttaccgtcaacatgccgccagacttaaaccactggacgccattaacgctggcaacctcaaaacctaacggatgtacacccaggtgcggtgtataacgcactattgcgtgtgaagtcagatcatcggggctttgcggataaccaaagcgcgtcagatagtgcggactggcacagttgaccatggtcagtttgccgaggggacgggcgataacgccatcttccggtaacgcgccagtgcgtatcacgcaatcaaaaccatcatgaagaatatctaccggacggtcatggctactcagttccagctcaattcccggatgcagatagagaaattccgacaggcgcggcagtaacaggcttttcgcgattcctggcgggatgtcgatgcgtaatttaccgctgatactggtggcatcctgttgaaacagaccgtccagttcgctgagattactcaacacatcttttgctcgttgataataggtcatgccttctggcgtgagtttgacccgtcgcgtggtgcgctggagaagctgggtgccaagttgatgttccagtgcctgtatctggcgcgaaacacttccctttggcaaagcaaagaaatccgctgcgcgggaaaaactttccagctccgcgactttgatgaacaactgcattgcgtgaattttatccatttctttgaccgattgttgttcacagcgaaacagtaacgcgcatatcgcattgtttattgttttttctaacatctaatgccgggtttcacaatgttgtcatgccgaatgtggcgatttctcagcaggaaaagggcggaatagctttctgagaaaggtgaatccccttaaacagagcgtatttttcagcgattccctttaaagtgaacagaggacgtgttggctatttgtgcttatttttgtctccttgccgtttgttattttggcttgtggtcgcggaatttcatttttaattgcatgcgtactaaccaccaatataaggaaatcctcaaaattgttttaaatagtgccctcgacatgtaatttcaggcgtttagctgtaactatttatatcggtaactattttctacacgtcatctctgtagaatggccaccgccaaatggcgaattcttattttttctcgcgggtaatacccttccactacttaagtctttttaacgtattcaggtggagattcagttatgcaaatagtcatgtttgacaggcagtcaatatttattcatggaatgaaaatcagtttacagcagcgtattccaggagtgagtattcagggggccagtcaggcagacgagttatggcaaaagctggaaagttaccctgaagccttagttatgctcgatggcgatcaggatggtgagttttgctactggttgctgcaaaaaaccgtggtgcaatttcctgaggttaaggtgttaattacggcgacggattgcaataaacggtggttacaggaagttatccattttaatgtgctggccattgtgcctcgtgattcaaccgtcgagacatttgcgttggcggtaaatagtgcggcgatggggatgatgtttctgcctggagactggcggacgacgccggaaaaggacattaaagatctcaaatcgttaagcgcccgccagcgggagattttaaccatgttagcggcgggcgaatcaaataaggagatcggcagagcgctgaatatcagtaccggaacggtaaaagcgcatctggaatccctgtatcgccgtctggaagtgaaaaatcgcacccaggcggcaatgatgttaaatatctcctcctgaagaggataattttacagccagcaggaagttagcggctggctgtaaaaatattatggttcgccgtacaaaccaattaaacggcgtaccacaccgttagtccagccaaacccatcctgcaacggatactcgccaccgccgccttcgcggggaacaccatcggcaatatggtatttttcgatcagtttgtgctgttccagatagaactgattcaccgtcttcagccagcttcgcgcgatttcatcacccagaaggtcatagccgtacattttaaatccctgaatcgccatccattgtaacggtgcccagccgttgggtttatcccactgttcaccggtttcgtactcgcttgccagaatcccgccaggtgtcagtaaccgactgcgcacggcgtttgccagacgatcggcctgttcatggttcgccataccgacatagagtggcacaatggcggcagcggaaaacagcgccagttgttcgcgtcgccagtcgtaatcgcggtagatgccgttttcatcatcccagaggtaacggtttaccgcatcgcgacgggcactggctttctggcggaacagtgcttctgtctctttctcgcctttcagcgccgagatgttggcgatggcgctctccagtttaaacaggaaggcattcagatcgatggggatgaactgggtggtacgaatgctcgccagacgaccagtatcacgcagccaacgggaagagtaatcccaaccggaggccgcccccgcgcgtaaatcgcggtacacctcgttgggcgggcgaccagaatgtttcgcggtttcaacgtcctcaagccaggattcgtcacgcggcgtgtcgcgatcgtcccagtaacggttgagcagcgatccgtccggcatccgcacaacatggcgataggcctgattagggattaacgattctgcaccgtccatccagaaggcatattccattttaaggtggtcgagatagcggcgcgcaccgcgtacaccatcttcttcaaacaactccaccatcagcgcaaaaaccggtggttgcgagcggctcaaataataggtgcggttgccgttggggatgtgaccgtagttttcgatcatccaggcgaagttatcggccatgcatttcagcaaatcttcccgaccactttccgccagccccagcatggtgaaataggaatcccaatagtaggtttcgctaaaacggccgcccgggacaatatatgactgcggcagcgccagcagagaagaccacggaatgtgatcctgtggttcgcgggttagcaccggccacagctggtcgatatgctctttcagggaattttgcgggtccgatacatactcgctggagtagacctccggcagccagaagtggttttcaacaaacttgcgcaagtcaaaatcacgatgacggcgcactttacggtagcggattaagatatccagcgggtccattttaggtgcgcagtcgggaaaggttttactgtcggggaaaattttcgccgactgaacatgctcgaacagttcgagatagcgatcggcaggcgtcagcgcatcagaggcaggcagcccttcaatcatctcgggttccggttctgcctcgatcatctcatccagttttaattcatacgggtccagctcatagcagagatcgacttcgatcatcagttcgtctggattagggttttgaattttctgattgagcataaggatccaacctccgaaattcgtcgctaattatcggcttttctttaagggtagtcattcgctccgcctggtgggcgacaaagcgtgcggtggatcacgtttattaacctgtcaaaaaatataacgcactaatatcaatggaatttataaaaataccgatttggtgttgtttttcattttcagaacattcaatcctgctctcgccgcaatcatgatatgccattcctgatctgggtaataggcacaggctatcttattgatagtttatattcatgtaattgattgattcctatcaaaaagcgtatctccctgttttttatgatggctttgtctcgcagagacgtttgcagcattctggaaaattttctgggtcacaataactcaccaccgtgagggaagaataatgaaaatggtctcacgtattaccgcgatcggcctggctggcgtcgcgatttgctatttagggttatctggttatgtgtggtaccacgataataaacgcagtaaacaggccgatgttcaggcatctgctgtcagtgaaaataataaggttttaggctttctccgcgaaaaaggatgcgactattgccacacgccttcggcagaattacccgcctattattatattcctggcgcgaaacagttgatggattacgacattaagcttggatataaatcttttaaccttgaggccgtgcgtgcggcactgctggctgataaacccgtttcgcaaagcgatttgaataagattgaatgggtgatgcagtatgaaactatgccaccaacgcgttataccgcgctacactgggcgggtaaggtgagtgatgaagagcgggcggaaatactggcctggattgcaaaacagcgcgcggaatattacgccagcaatgatactgctccggaacatcgcaatgaaccggtgcagcccatcccgcaaaaactgcctaccgatgcgcaaaaagtggcgttgggttttgcgctgtatcacgatccccgtttatcggctgatagcaccatttcatgcgctcattgccatgcgttgaatgcggggggcgtcgatggcagaaaaacatcgattggtgttggtggcgcagttgggccgattaacgcgccgacggtatttaactcagtatttaacgttgagcagttctgggatggtcgtgcggcaacattgcaggatcaggctggtggaccgccgttgaacccgattgaaatggcgtcgaaatcctgggacgaaattattgctaagctggaaaaagatccgcagcttaaaacgcagttcctcgaagtctatccgcaaggtttcagtggcgaaaatattactgatgccattgctgaatttgagaaaacattaattacgccggattccccatttgataaatggttgcgcggagatgaaaatgcgctgacggcgcaacagaaaaaaggctatcaattatttaaagataataaatgtgcaacttgtcatggtggtattattctcggcggacgttcctttgaaccgttggggctgaaaaaagactttaactttggggaaattacggcggcggatattggtcgtatgaatgtgactaaagaagagcgtgataaattgcgtcagaaagtacccggtttacgtaacgttgctttaacggcaccgtacttccatcgcggtgacgtgccgacgctggacggggcggtgaaactgatgctgcgctatcaggtaggcaaagagctgccgcaggaggatgtggatgatatcgtagctttcctgcacagtctgaacggggtgtacacgccgtatatgcaggataaacaataattaatttgatcgcccgaacagcaatgtttgggcgatttttattacgataataaagtctgtttttaatattatcatgttaaatgtttatattataaaaagtcgtttttctgcttaggattttgttatttaaattaagcctgtaatgccttgcttccattgcggataaatcctacttttttattgccttcaaataaatttaaggagttcgaaatggaccagaagctgttaacggatttccgctcagaactactcgattcacgttttggcgcaaaggccatttctactatcgcggagtcaaaacgatttccgctgcacgaaatgcgcgatgatgtcgcatttcagattatcaatgatgaattatatcttgatggcaacgctcgtcagaacctggccactttctgccagacctggtcatcgggcattatctgaacataaaacactatcagtaagttggagtcattacctactcatcaataataaaaaagtagtcagttaatgcacttaagggattattaacaaatgaataaggaagaacaatatcttctttttgcgctttctgcgcccatggaaatacttaatcagggttgcaaacccgcgcatgactcgccaaaaatgtatactgggataaaagaattcgagctctcatcatcctggggaataaataatcgtgatgatttaattcagactatttatcagatgactgatgatggtcatgccaatgatttagctggcttatatctgacatggcatcgctcttcccctgaagagtggaaagcattaattgctggtggctcggagagagggttgatttatacccaattcgttgcccaaaccgctatgtgctgtggggaagggggaatcaaagcctgggattatgttcgaatggggtttctgtcacgggtcggtgtgctcaacaagtggctgacggaagaagagagtttatggctgcaatcgcgcgtctatgtacgagctcaccattactatcacagctggatgcactatttttccgcctattcgttaggacgtctctactggcaatcttctcagtgcgaagacaacacttcgctacgcgaggcgctaaccctgtacaaatacgatagcgccgggagtcgtatgttcgaagagctggcagcgggaagcgatcgtttctatgccacgcttccctggcagccattaactgtccagtctgaatgcccggtaacgcttaaggatgtgagcgacctatgaaaacatgttggcaaatcctcgaaattgaaagcacgacgcaaatagacattatccgccaggcttatcttgctcgcttaccgttgtgtcatcccgaaaccgatccgcaagggtttaaagcattacgccaggcctatgaagaggccctgcgactggcggtaaatcctgtcgaggaagcagatgatgaagaaaaagatgctgccgctgaacatgaaatactacgtgcattcaggacattactggattcagaaagtgatcgttttcagccttccgcctggcagaaatttatttagcaattaaatacctggaacatggaggatgtcgatcaattacgctggccgctgtgtgcaatcgccatagaagcgcgatatctttcattaaattgtgcttctttgctggcagagcgtttgaactggcattcatttaatgacagcgaaggaatggatgaggaagaaagggaggcttttcttgaggccattcaggctggtgattgtttcgatttccttagccttctggaatatcccattgcgttgcagaaccagactgttgagtattacttcgcgctggaacgttgctgccgttaccatcctgactatgtcactgcgtttttggcgatggaaggtccgtggttaattcctgatgatgcaaagttacatcgcaaactgttgcgctggtacagctcggtgcaaacaggtatggcggaactcattcctgtcgctcaacagtggcaaacggaagaaccagaaagcgaagatgcccggtattacttgtgtgcacaacgtttgtactgcggcgagggggaaagcctgcttgccgatctctgcgcgtactgggaaagttacccatctacacaagctgataatttgttgttgcagtggagcaagcgtcattgcccggattatttcgcgttattagtgatggttatcgaagcgcggagcatggtagatgcgcaaggtcaaccgctgaaatatgttcctggtgagagcgcccggacgcggctgttatgggcggagattttacatagcggaaaattatcgccgttaggtcaatcgtttattgagtcgttattcttcaagcgcaaagcatgggcgtggtggaaatcgagagtcggtagcgagacagagcaagattcaccgttcctggatttgtatcgggtagcggaacaggtagtacttgaagcgtttccgaaacaagagatgctggcccgtcttaatacaaggctggaaggcggagatgctcatccattagaggccattgtcacccggatgcttttgacgaaagtgaaactcgagccggaggatgaagatgtcgatgagccaacacctgaaaatcatgaagaaaaaaatgatgagggtgaaaaaccacagagcattaccagcattatcaaaatcagtttaacggtgctggtgataggttatgctctcggcaaaatcgcgatgttgtttagctgacgatgtgttttttgcgccgatgccggatgcagcgtttacgccgcatccggcagccgtgtttatgggatctcaatggctaaataatcgctcgcccgccgccgaacttcatccacgcgggccatatcgtttgactgcaatgccgcatcaaaatcggtgatcacccggccgatctcttctcgctcgtcacccagcgcccgcgcccacaactcttccagtttggctttaaaggtgcgattgatgagcatatcgcgcggataaattttcaatgcggataaccgcgtccgactctcttcaatctgctgcgcgctcaatgttaccgggctgtggttaatcactctggacttaacgctgccgtcttccagaagcacgtcaacttcaagcaacccgttgatatcataactaaagcgaatatcaatcgactgataagccccggttttcttcaacggcacatcgaaggattccaccagaatgttgtttttaactttgtggttttctccctgatagacgttaaccgtaattgaatcctgttccgggtgcatggttgaataagtttctacacgcgacacgggcacagtggtgtttcgttcaataatcggcgagaaaatgccggaaacgccctggcggttaacttcaacgcccaacgagtaagggcaaatatcagtgaggattacctcttcaatatcttcactgcgtaagcggcaggcggcctggattgctgcgcccagcgcgacaatggtgctcggatcgtaactttgatacggtaatttgccaaacagacgcacggcgattcgctgcaccagcggcatttgtgacgcgccgccaaccagcaccagactgtcgatttgactcggcttcagacgcgcatcgcgcaacgcctgttcaatcggcactcgcaagcgattgagcagcggcaaccacaaatcttccagttcgttctcgtaaaattcgcattcccgcgtttcttcctgatactgccagcgaatgtgcaatggcgattgattgctacattttgccgcttccacacaggcgtacaaggctgccagttcactctcgttaagcgtggtcctggcgacatccgcgcgttttaaaacctcatcgaccagcatatgggtaaaatcttcgccaccaagaaagttgtcgccagcggaggcgtgaacttcaatcaccggcgtggcgtactcaagcaccgtaacgtcaaacgtgccgccaccgagatcaaacaccagcgaacgggtattttgttgggtatgcaggccatacgccatcgcagctgctgtgggttcattaattaagcgtaccgcatttaacccggctaactccgctgctaaacgggtatgcttgcgttgttcatcgctgaaataagccggaacggagatcaccacatctttaatcggacgttgcagaaattcttcggcatcttcttttaatgagcgtaataccaaagaggacagttctggcgcgttaaatgtgtcgctgcctaaccgccagttggtattactgcccattgcacgtttaaataacgctgccgttttatccggatgcgaagtacgccgtgatacagccggttttccgactaaaatatgattattttcatccatgctaattatggatggtgttaaatattcaccgaacttatttggaattaattgcgcggcaccgtctttccagacggcaattaaactattggtagtaccgagatcgataccaatggcgagttctgcattatccattgcatttatatcttgaaagaaaaagagataaacagattaagaccacccaggtaacgcgtggtgatcttaatcaatgacgtgtgttaagcgtaaaatttcagacgatcagccagtaaatcaacaaagccctgacgatcaacatcgaccattacggtggcattcggtttattgcctgtcagataataataatcaacaaccgtcataccctgggtatatttcccctgtgtttccacgccaacccagcgctcaacagaggtaaataactccggtttcaacagccaggcgatggtgcatgggtcatgcagtggtgcgccgacaaagccccatttttcgtctttatgatattcgaggaagaaatccagcagttcggcaacaatggttgaaacagggttaccaatcgcgcggaaacgctcggtgtcttcaacgtggatttgtgctttatgagtaacatccagaccggccatcaccaccgggatccctgactggaagacaatttctgccgcttccgggtcaacgtaaatattaaattcagccgcaggcgtccagttacccagccccatagcgccacccataatcacgatacgggcaattttgctatgcagttccggatggctattgagcagcaaggcaacgttagtttgcggtccggtagacacaatggtgacaggttccgcactttcacgcagcgttttcgccatcagctctaccgccgtacagttttgcggtgcgaatgtcggttccggtaatgccgggccgtcgagaccgctttcgccgtgcacattgtccgcgataatcaactcacgcattaacggttttaccgcgccgcctgctaccggaatatcggtgcgattaagcaaggtcagcatacgcagaacattgcgtaaggttttttctggtgtctggtttccggcggaagacgtaattgctttgacatcaagctctggtgaggcgagggcgagaactattgcgatagcgtcgtcatgacctgggtcgcaatctaacagaattggcagtgccattgttgctccttgttgtgtgcttctttgcgacaagggtaacgccaggatgtaacagatacgaggggcgaaacgataaagcgtgagatggcgcgcaattgggtatgcgcgccagagtgattaatgcaggattttcgcgaggaagtcttttgcgcggtccgatttcggatcatcgaagaaagcgtctttcggcgagtcttcgacaattttaccctcgtccataaagatcacccgattcgccactttacgggcaaagcccatttcgtgggtcaccaccatcatggtcattccttcgttcgccagttccaccatcacgtccagtacttcgttgatcatctccggatccagcgccgatgtcggttcgtcaaacagcatcgcaataggatccatacacaacgcgcgagcgattgccacacgctgctgctgaccgccggaaagctgcgccggaaacttattggcgtgagcagaaagcccgacacgctccagcagtttcagggctttttcacgagccggcgctttatcgcgtttaagcactttcacctgcgccagggtcaggttttcgataatcgacagatgagggaacagctcgaaatgctggaataccatcccgacgcgggaacgcagctttgccagatcggttttcttgtcgttaaccacgataccatcgacggtgatttcaccttgctgcaccggttcgaggccgttgacggttttaatcagcgttgatttgccggaaccagacgggccgcaaaccaccaccacttcgccttttttcacttcggttgagcagtcggtcagcacctgaaagtgaccataccattttgaaacatttttcagggtaatcattatgctgtccttcttttcaagtagctgaccaacaacgacgcgctaagactaataacgaaataaacaaatccggcaaacaggatcatctcaacctgcgtaccatcacgctcaccaatggttgaggcggtacggaagaaatcggccagggataacacatacaccagtgaggtatcctggaacagtacgatgccctgagtgagcagcagcggcaccatcgcgcggaacgcctgcggcagaataatcagtttcatcgactgccagtgagtcattcccaacgccagcgcggcgctcgattgaccacgagaaatactttgaataccagcacggataatctctgaatagtaggccgcttcaaacatcgaaaacgccaccatcgccgaaattaaacggatatcattttttggcgataatcccagcacgttttgcagaaaacccggcacgatcaggtaaaaccacagcaaaaccataactaaaggaatcgagcggaatacgttaacgtaggctttggcaaaccacgccacgggcgcaaagctggataaacgcatcaccgccagcatcgtgccccacaaaataccaatcactaccgccgtgacggtgattttcagggtgatcaccagcccgtcgagcagatatggcagggaagggacaatggaactccagtcaaactcgtacattatttgccccccatgttgccaggcaggcgaactttacgttcaaccagcgtcatcaccagcatgataaaagcgttaatcaacacatacgccagcgtaatggcggtaaacgactcccaggcatgggctgagtaatcgagcaatttacccgcctgcgccgccatatccaccagaccgatagtcgaggcgatggcggagtttttcaccaggttcatcatctctgaggtcatcggcgggacgataacgcgataagcattaggcagcagtacgtatcgataagcctgcggtagcgtcaggcccatcgccagcgcggcatttttttgccctcgcggcagcgactgaatcgcggcgcgtacctgttcgcaaacacgggcggcggtaaacagccccaggcagagcatggatgaaaggaaaaactgaatattgggatccagctcggccttaaaccacatgccgattttctccggcagcagctccgggatcaccagataccaggtaaagaattgcacaatcaacggcacgttgcggaacagttcgacatacaacgtacccagaccagagagaaaacggtttggaacggtacgtaaaatgccgaaaaatgaaccgacgaggaaagcgataatccaggcgcagatcgacaaagcgatcgtcacctgaaaaccactccagatccaaccaagataggtggtgttgccgaacggggcttgttgtaaaaaaataccccagttccagtctatagacataaatctactccagaaaaaagagggtagcagcgttaactgctaccctcgaagattgttacccagcgtattgcggttttcaggcccgatggggaacgaccatcaggcgtatagtctgtccgtgctacgtaacaatcgagagggctggaatttccgcccctggttcttgtaattagttcagtgccttgtcattcggttctttgaacagtgctttcatttcgtctgacagttcgaaattcatgttcaggtttttcggcggaattggatttttgaaccacttatcaaaccatttttccgcttcaccggaggtctgcacctgagcgatggtgtcatccatcagctttttgaactgcggatcatctttacgcaacatacaaccgtaggcctcctgagactgcggcttgccgacgatttcccagttgtctggtttcttcgctttcgcacgttcaccggccagcagagcgtcatccatcataaaggcaacggcacgaccgctttccagggtgcggaaagagtcaccgtgatctttggcgctgatgatgcgcatattcattttttgctcttcattcagtttgttgagcaaaacttcagaggtagtgccggaagtgacgactacggctttgtctttcaggttggcaaaatctttgatatcgccaccctttttggtcaacaggcgcgtaccgaccacgaaaatagtgtcagagaaagccgcctgtttttggcgttcgacgttgttggtggtagaaccacattcaaaatcgaaagtgccgttttgcagcagtggaatacggttttgtgaggtaatcggaatcagttttacctgcaagtccggtttgttgagtttctttttcactgcttcaacaatggcgttggagtaatcctgcgagtaacccaccactttttgctgattgtcgtaataagagaaaggcactgaagattcacggtgaccgacgacaatcacaccgtttttggcgattttgtccagagtactgcccgctgccggggcggcgtcatctgcctgtgccagtcctgcggaaagcgccagggcgaggattgctgtggcaggtttacgtaattgcatatccaactcctttatcttctgcgttaagaacgcatggatacccgttgtgagtgtttgtgttgttatcgtctgcaactttattgtgcagtgttgtgcctgttaggtaacatttagtttggctaaatgtaaagatattgctgttttattgtttgtttttgcgagatgcgccgcaccattccgaagcaaaattcttaaaatgcactcttttagtgctaccgctggattactgtggtgcaactaggttgtactgatgctgattcagggtttgccttgtataacaaagcaatagatgtgccaaagttggataggagaatattgttatccggataatgcactgatgccgcatccggtgagcgtgccgaaatatgggatgtattccggcacgataagaagggattatttacgtcgctgacgcagactcatcaacacagcagcaaaaccaaacaatgccgtcagcacccacagcggccagttgccggtacgtgcgtatggtgtgagtccggtggtcggcgtcacgttagtggttaacacctcgcgggtgaactgcgggatcatcgcctgaatctcaccctgcgggccaatcaccgccgtaatgccgttgttggtgctgcgcaacagtgggcgcgccagctccagcgcacgcattcgcgccatctggaagtgttgccatggaccaatagatttaccaaaccacgcatcgttggagatagtcagcagatagtcggtatccgggcggaagttatcgcgcacttgctcgccgagaatgatctcgtagcaaatagccgcagtaagctcaataccatttgccgacagcggcggctggatatatggcccacggctgaacgacgacatcggcagatcaaagaacggtgctaacggacgcagaatcgactccagcgggacaaactcgccaaacggcaccagatggtttttgttatagcgatcggctgattcgtagctgtacggcgcacctttacccagcgtgatgatggtgttgtaggtatcgtagcggttctgcttattgagacgcgcgtcgacaatcccggttaccagcgagctacctttatcacgcaactcaccgtccagtgctttgaggaacggttgctgattaatttccagatcggttatcgccgactccggccagataatcaacgatgatttgcccatcagcggtgccgttgcgttgtagtaaatcttcagcgtattaagaagctggccttcgtcccatttcagcgattgcggaatatcgccctgaaccatcgaaacctgaatggttttctccggttgtggggtaaaccactggatgtaacgcagcgggaagggaagggcaaacagcacgacggccaccaccagcggacgccagttgcgtttgaccaacgccagtgccagcaggccactaaccatcatcagcaggaagttaatggcttccacgcccattatcggtgccagcccttttaacgggccatcaatctggctatagccgaactgtaaccacgggaagccggtcagtacccaaccgcgcagaaactcggtcacttgccagagggcaggggcggcaatcgctacgcgcagccaggtggttttcggccacagacgcgacagcacgccagcaaacagtccggtatacagcgacaaatacgccgccagcagcaccaccaggaagatgttaaccgggccaggcattccgccaaaggtcgcgatgctgacatagacccagttaataccgctgccaaagaggccaaatccccagcaaaagccaatagcggcagactggagtggacggcggttaaaggtcaacgcctgaagccccatcagcgaaataatcgccgcaggccagacgtcgtaaggagagaaggccagcgttccgcaggcaccgaataataacgccagcagcaggcgaatgcgctggcgttcaattaatgaggcaaaagccatgtagttatctatccagtttcggttttattcatccagcttcggctggggtgagtcatccgggattttgacatgaacctgaataatacgccgactgtcggccatcgccactttgaactggtaaccgtcgatgtcgatagtttcgccacgcgccggaagatgcccaaatgcctgcatcaccagaccaccgatagtgtcgacttcttcatcgctaaagtgggtgccgaacgcttcgttgaagtcttcaatggaagccagtgcgcgtacggtccaggtatgacgactcagctgacggaagtcgatatcatcttcttcgtcatactcgtcttcaatctcaccaacaatcagttccaggatgtcttcaatggtcaccagaccggaaaccccaccgaattcgtcaataacgatcgccatgtggtaacgctgagagcgaaactctttcagcatccggtctacgcgcttactttcaggaacgacaaccgcctgacgtaacactttgtccatgctgaaggcttcagcatcgctgcgcataaacggcagcaagtctttcgccatcagaatcccttcaatgtgatctttgtcttcgctaatcaccgggaaacgtgagtgggcggactcgatgatgacatcaagacattcgtccagcgtctggttgcgtttcagggtaatcatctgggagcgggggatcatgatgtcgcgaacgcgttggtctgcgatgtccatcaccccttcgagcatatcgcgcgtatcttcgtcgataaggtcgttctgcccggaatcacggatcagcgccagcagttcgtcacggtttttcggttcaccgtggaaaagttggctgagtaacagggagaaaaatcccttcttgttgcttatcgtgtcactactgtgtgaattgtcgtcgctcatggcgtcgtatgggttctcatgttagttaatcaaaacgccgtcgttaatcaccaacggcggggacgtctgccagtcaaatgcctggcaaattattctttctcggcaatgtacggatcctcatagcccagagcaagcataatctctgtttcgagggcttccatttcttctgcttcgtcatcttcgatgtgatcgtaacctaacaaatgcagactgccgtgcaccaccatatgcgcccagtgcgcctccagtggtttgccttgctcctgagcttccttctcaaccacctgacggcagataaccagatcgcccagtagcgacatttccatgccaggcggcacttcaaacgggaaggagagcacgttggtcggcttatccttaccgcgataggtcagattcagactgtggctttcggcggtatcgaccacgcgaatcgtcacttccgattcttcctgaaactgcgggatcaccgcattcagccatgtctgaaactggctctcttccggtaacccggaattatcttcacatgccagttgtaaatcgaggatcacctgactcatttttgttcctgttcttcgcgcttgcgttctgctgccagcgccgcttttcgtttttgttcggcttcttcccaggcttcataggcgttaacgatacgcgccaccacagggtgacgaaccacgtcttcgctgtggaagaagttaaagctgatctcttcgacatcggccagcacttcgatggcgtgacgtaagcctgatttagtattacgcggcaggtcgatctgtgtgacgtcgccggtgataaccgcttttgagttaaaaccgatacgggtcaggaacatcttcatctgttcgatggtggtgttctggctctcatcgagaatgataaacgcgtcgttcagcgtacgaccacgcatataggccagcggtgcgacttcaataacgttgcgctcaatcagtttctcgactttctcaaagcccagcatttcaaacagcgcgtcgtacagcgggcgcagatacgggtctactttctggcttaaatcgccaggcaggaagcccagtttctcaccggcctctactgccggacgagtcagcagaatacggcgaatttcctgacgctccagggcatcaactgccgcagccactgccaggtaggttttacccgtacccgccgggccaacgccgaaggtaatgtcatggtcgagaatattggcgatgtactgcgcctggtttggcgtgcgcggcttaattacgccgcgtttggttttgatattgaccgctttgccgtactccggcacgctctccgcgctttgctccagtacccgcgcttctttaatcgcaaggtggatctgttccggttcgatatcctgaatctgaccgcgcatcggggcagtatcgacatacaggctacgcagaatgtctgccgcagcggtgacgcaaatcggacggccggtcagtttaaagtggttatcgcggcgattgatctcgatgccgagacggcgttcgagctgcttgatgttgtcatcaaacgggccgcacaggctcaacagacgcgcattgtctgctggctccagggtgatttcgcgagtgtctatgttcaaaccgttcctcttatctgtatgccgccggaagctgaacattcaccggcctataaggaaattattcacgccacaggaaaaaggcgcaagcattgcaataaagatggggataaagagagaaaaaacaaggcccaccggaacggcaggcctgagaattacggctgataataacccacgccaaggtcgttttctttgcgggtacgggcaatcactgattccggtgtttctgccacgcgcagacccatttcatcttcagtacgcaccactttaccgcgcagagagttcgggtagacgtcggtaatttctacatcgacgaatttaccgatcatatccggcgtgccttcgaagttgaccacgcggttattttccgtacgcccggaaagctccatgatgctcttacgcgatgtaccttctaccagaatacgctgggtggtgccgagcatccggcggctccacgccatcgcttgctgattaatgcgctcttgcagaatatacagacgctgcttcttctcttcttccggaacatcatcaaccatatcggcggctggtgtacccggacgtgcagagaagataaagctgtagctcatgtcgaaattgacgtcggcaatcagcttcatcgttttctcgaagtcttcggtggtttcgccagggaagccaacgatgaaatcagaactgatctgaatatctggacgcgccgcacgcagtttacggatgatcgctttgtactccagcgccgtatgggtacggcccatcaggttcagaatgcgatcggaaccgctctgtaccggcagatgcaggaagctcaccagctccggcgtgtcgcgatacacttcgatgatatcgtcggtgaattcgatcggatggctggtggtaaagcgaatacgatcgatcccgtcgatcgcagcaaccagacgcagcagatcggcaaacgatccggtggtgccgtcgtagttttcaccacgccaggcgttcacgttctgaccgagcaggttgacttcacgcacgccctgagccgcaagctgggcaatctcaaacagaatatcgtcggacggacggcttacctcttcaccacgggtgtaaggcaccacgcagtaggtgcaatatttattgcagccttccatgatggagacaaacgcggtcggcccttcggcgcgcggttccggtagacggtcaaacttctcgatttccgggaagctgatatctacaaccgggctgcggtcgccacgcacggagttgatcatctccggcagacggtgcagcgtttgcggcccaaaaataatatcgacatagtgggcgcgctggcgaatgtgctcgccttcttgcgatgccacgcagccaccgacgccgataatcaggtctggattcttctcttttaacagtttccagcgacccaactgatggaagactttttcctgagccttctcgcggattgagcaggtgttcagcagcagcacatccgcttcttccgccacgtcggtcagttgatagccgtgggtggcatccagcagatcggccatcttcgatgaatcgtactcgttcatctgacagccccaggttttaatatggagttttttggtcatcgacttgctcttgcgaaatagtagccaggaatgcagggcgcatagtgtaatgctttgctgccgttgtgaccagtatgagcgttatcagcccttaggggtaaaaatcctgtaaacttaaagcatattgctaacaggatgattgaccatgacaaatcaaccaacggaaattgccattgtcggcggaggaatggtcggcggcgcactggcgctggggctggcacagcacggatttgcggtaacggtgatcgagcacgcagaaccagcgccgtttgtcgctgatagccaaccggacgtgcggatctcggcgatcagcgcggcttcggtatcattgcttaaagggttaggggtctgggatgcagtacaggctatgcgttgccatccttaccgcagactggaaacgtgggagtgggaaacggcgcatgtggtgtttgacgccgctgaacttaagctaccgctgcttggctatatggtggaaaacactgtcctgcaacaggcgttgtggcaggcgctggaagcgcatccgaaagtaacgttacgtgtgccaggctcgctgattgcgctgcatcgccatgatgatcttcaggagctggagctgaaaggcggtgaagtgattcgcgcgaagctggtgattggtgccgacggcgcaaattcgcaggtgcggcagatggcgggaattggcgttcatgcatggcagtatgcgcagtcgtgcatgttgattagcgtccagtgcgagaacgatcccggcgacagcacctggcagcaatttactccggacggaccgcgtgcgtttctgccgttgtttgataactgggcatcgctggtgtggtatgactctccggcgcgtattcgccagttgcagaatatgaatatggcacagctccaggcggaaatcgcgaagcatttcccgtcgcgtctgggttacgttacaccgcttgccgctggtgcgtttccgctgacgcgtcgccatgcgttgcagtacgtgcagccagggcttgcgctggtgggcgatgccgcgcataccatccatccgctggcggggcagggagtgaatcttggttatcgtgatgtcgatgccctgattgatgttctggtcaacgcccgcagctacggcgaagcgtgggccagttatcctgtcctcaagcgttaccagatgcggcgcatggcggataacttcattatgcaaagcggtatggatctgttttatgccggattcagcaataatctgccaccactgcgttttatgcgtaatctcgggttaatggcggcggagcgtgctggcgtgttgaaacgtcaggcgctgaaatatgcgttagggttgtagccttacaacattgccggatgcgtgccaaccgtaggtcggataagacgcggcagcgtcgcatccgacattgaaggataagacgtgtcaacatcgcattcgacattgaatgaacgcagaaaagcaaaaagctcgccgaagcgagcttttttaatgtggctggggtacgaggattcgaacctcggaatgccggaatcagaatccggtgccttaccgcttggcgataccccaactgggtgcacttacaaggtaagcgtcttgaataaattggctggggtacgaggattcgaacctcggaatgccggaatcagaatccggtgccttaccgcttggcgataccccaacaaattggttttgaatttgccgaacatattcgacacattcagaatttggtggctacgacgggattcgaacctgtgaccccatcattatgagtgatgtgctctaaccaactgagctacgtagccagattgtttcttcgatggctggggtacctggattcgaaccagggaatgccggtatcaaaaaccggtgcctnnnnnnncgatggctggggtacctggattcgaaccagggaatgccggtatcaaaaaccggtgccttaccgcttggcgataccccaataaccgggcggtgaaccgcttactcgaagaagatggctggggtacctggattcgaaccagggaatgccggtatcaaaaaccggtgccttaccgcttggcgataccccatccgtacaacgctttctggtgaatggtgcgggaggcgagacttgaactcgcacaccttgcggcgccagaacctaaatctggtgcgtctaccaatttcgccactcccgcaaaaaaagatggtggctacgacgggatttgaacctgtgaccccatcattatgagtgatgtgctctaaccaactgagctacgtagccatctttttttttcgcgataccttatcggcgttgcggggcgcattatgcgtatagagccttgcagcgtcaacctctttttcaaggaaaattgctcgaaagtgactgtttggttaggttgcgaacagcgtggcgctatattcgtcaattattgtttactttgtgttttttcccaccctacagccattcttttgtcatacaggatgaaattcggaatttaacaatagtggtgggaaattaatctatgaaatactggcctacagtgatgagttgtcaaacagtgatgtggcaaacccggaacatttccttactgcatatcagaatcaacaagcacctcaataactgaaacagccccggatttcaccggggctgtttcgcatttcttacttatacgccgactggtgaacaccaaccgcgcgaccagacggatcgtccattttcttgaacgcttcatcccattcgatcgctttagcggaagaacaagcgacggaaggaccgcccggcacgcactcagcggcgctcggaagcgggaatagttcttcaaagatctcccgatacaagtacgcttctttagaggttggcgtgttgtacgggaagcggaagcgggcagtttccagttgctgatcagaaacctgctgcgcagccacttctttcagggtgtcgatccaactgtaaccgacgccatcggagaactgctctttctgccgccaggccacgcttgcaggcagatacgcttcaaaacattcacgcaggatgtgtttttccattttgccgttaccgcacattttatcctgtgggttaatacgcatcgccacatcaaggaattttttgtcgaggaacggaacgcgtgcttccacgccccaggctgacatcgctttgttggcacgcgcgcagtcatacatatgcagggccagcagtttacgcaccgtctcttcatgcagttctttggcattcggtgctttgtggaagtaaagataaccgccgaacacttcatcagaaccttcaccggacagcaccattttaatgcccatcgccttgatcttacgcgacattaaatacatcggtgttgaagcgcgaatagtggtcacatcataagtttcgatgtggtaaatcacgtcgcggatggcatccagaccttcctgtacagtgaagtgaatttcgtgatgcaccgtgcccagatggtttgccacttcctgggctgctttcagatccggtgaacccggcagacctacagcaaaggagtgtaactgcggccaccaggcttcagagcgttcctgatcttccacgcgacgggctgcgtatttcttggtgatagcggaaataattgaggaatccagaccaccagaaagcagcacaccgtaaggcacatcagacatcagatggcttttaactgaatcttccagtgcctgacgcagctcgtttttgtcggtcacgttatctttcaccgcatcgtagtcgaaccagtcgcgatgatagtaagaacggatttcgccgtcctggctccacaaatagctccccgccgggaactctttaatcgtgcggcaaactggcaccagcgctttcatttctgaggccacatacagctgaccgtgttcgtcataccccatatacagtgggatgatccccagatggtcgcgaccaatcaggtaggcatctttttcgctgtcgtacagtgcaaaggcaaacatgccctgcaagtcgtcgagaaattccggccctttttcctgatacagcgcgaggatcacttcacagtcagacccggtctggaactggtaacgatcgccatattcggcgcgcaatgcctggtggttgtagatttcaccgtttaccgccagtacgtgggttttttgttggttgtagagaggttgcgcccccgcgttaacgtcaacaattgacagacgttcgtgggcgagaatggcgttatcgctggcataaataccggaccagtccgggccacgatgacgcatcaggcgtgacagctcgagggctttcttacgcagctcaactgcgtctgttttgatatcgaatacgccaaaaattgaacacataaccttctccgttaacctggtatttgttgcttgttgtgtttgcttgtttaaaaaaatgccgcaaagcagcactgtgcgcaagcgatttggcggtgaaaaaataaaaaacgtaatggtgattgtcgattggtgaaaaaaggtctggtgtgaggatatatttattgatgaatcgataatttttagcgggttttattgaatgtttatattttacgggggccaaattgctgacaaagtgcgatttgttcatgccggatgcggcgtgaacgccttatccggcctacaaaagcatgaaaattcaatatattgcaggagctgcgtaggcctgataagcgtagcgcatcaggcagtttggcgtttgtcatcagagccaaccacgtccgcagacgtggttgctattcagataacgtcgatttcagcgactgacgggtaaatccagctggggcggaaaggcatactgtcgatatcgtcgagcgacgaaacaccagaaagcaccagaatcgtctccagacctgcctggaagccggccagaatatcggtacgcaggttatcgccgacaatcaccgtttcttccgaatgcgcctgcattttgtttaatgctgcgcggatgatccacgggctgggcttaccaacatagaacggtttgcgcccggagattttctcaatccctgcacacaacgcgccacaagcgggataaaaaccgcgcccgtgggtgtccggattggtggcgataaaacgtgcaccgttagcgacgaaataggctgctttatgcatcatgtcccagttgtaggaacgcgtttcgccaacaatcacgaaatcagggttcacatcggtaatagtgaaaccggctttgtacagttcatgaatcagtgcgccttcgcccaccacatacgctttcttgccttcctggcgacgcaggaaatcggcagtcgccatcgcagaggtataaaacacgctgtcaggtacatcgacacctgcggtggcaaagcggttcgccagatcttgcccagtctgcgaaggatagttggtcagcaacaccagcggcaggcctttatccataatcccgtgcaaaaattccgctgcacccggtacggcgacgttatcgtgcatcagcacgccgtcgatatcgcaaattacatttttaatggtcatggactacccagaatattgacaacaataagcgccactataaaagcacattaattttccagcaaatgctggagcaaaataccgttgagcatggcgcgttttaccagcgcaaaagcgccgattgccgagcggtgatccagctcagaacgtaccaccggcagattagtgcgaaacgccttcagcgcctgggtattaatgcagctttcaatagcagggagcagcactttatcggcttcggtgatttcaccggcaataacaattttttgcggattaaataagttgatagcaatggcgatggttttacccagatgacgaccgacatactcaattacttccgacgccagactatcgcctttgttcgcggctttgcagatagttttgatggtgcagtcgtccagcggcacgcggctctggtagccctgctttaacagattcaacacccgttgttcaatggcagcgttggcggcgatagtttccaggcagccaaagttgccgcagtggcagcgttcacccagcggttcgacctgaatatggccaatttcaccgacgttgccgttgcggccaataaaaatgcgcccgttagagatgattccggccccggttccgcgatggacacgcactaaaatggagtcttcgcaatcctgacttgcaccgaagtagtgctctgccagcgccagactacggatatcgtgaccaacgaaacaggtcactttaaaacgctcttccagtgcttctaccagcccccagttttccacctgaatatgcggcatgtaatgaattttgccgctgtccgggtcaacaagtccaggcaggatcacggaaatggcgatcagctcgcgcagcttgcgttggtagctatcaataaactgagcaatggcattcagcagggcatgttccagcgtctgctgggtacgttccggcagcgggtaatgttcttctgccagcactttgctgctgagatcaaacagagtaatggtggcgtcgtgacgaccaagccgtacaccgattgcgtggaaattgcgggtttcggtgacgatagagatagcgcggcggcccccggtggaggcctgctgatcaacttctttgatcagcccgcgttcgataagctgacgcgtaattttggttacgctggcgggggcaagctggctttgctcggcaatctgaatccgcgagattggcccgtactggtcaatcaggcgataaaccgccgcgctgttaagctgttttacgagatcaacattacctatctgagcttgtccgcctggtgtcatactttctcttattgagttacgacctcgttaccgttaacgatggtcctggtgattttaaaatcaggtgtgaatgcggtcaggttggctactttacctgcggcgagtgtgccgagacgtttctcaacgccaatcgcacgcgccggatagagcgtcgccatacgcagcacttcatccagtgcgataccgcaatgttcgaccagattacgcacgccttcaatcatggttaaggatgaaccgcttaacgtaccgttctcatccacacaaagtccgttacggtagtatattgttttacccgcaaaaatgaactgttcaatgttggcacctgctggcgcggtggcgtcggtaaccagacacagtttgtcgcctttcaggcgtttagcgttacgaatgttggcgtaatcaacatgcaggccatcagcgataataccgcaataaatgtcagcttcgtcgaggatcgcgcccgccaggcccggttcacgaccggtaatatacggcatcgcgttgtacagatgggtggcaaaggtaatccccgcgcggaaaccggctttcgcttctttcaacgtcgcgttggagtgaccggcagaaaccacaatcccggcatttgccagtttgctgatgacttctgcaggaaccatttccggtgccagggtcactttagtaatgacgtcggcgttcttacacaggaaatcgaccagcgcggcatcaggcttacgcacaaaattcggattatgggtgcctttttttaccagattcagccacggaccttccagatgcagacctaacgcctgattcggatgttttgccaggtactcgcgcataacgcgcacgccctgtttcatcagctcatcgctggtggtgataagcgtcggcagatagttagtacagcctgatttctcattggcgttctgcatgatttccagcgtttccacgctgaccgcttcagcggtgtcgttaaactgtacgccgccgcagccgtttaactgcacatcgataaaaccgggggagagaatggccccgttcagtgaacgttgttcgatctctggcggcagttccgctaccggacagacgcttttaatcaggccatcagcgataacaaccgcgtggtcatcaagaaattcgtggccggtaaagatccggccctgggttaatgcatacattctgacccccgattttaaaaaatattgccctgagcaaggagccagggcagggataacaattacagacctttgatattttctgcttctaattcattgaaatatcttaaagtcttaactttcagctccatggtggaaggttcatcgcataccatgatcgcttttggatgcagttgcagacagctgatggtccacatgtggttcacgcaaccttcaacggcggcctgcagtgccagtgctttctggctacccagcaccagaatcatcacttcttcggcatccagcaatgtaccaacaccgacagtcagggcatattttggcacctgattgacatcgttatcaaagaaacgagagttcgcgacgcgagtgtcatgagtcagggttttgatacgagtacgagaagccagagaagacgccggttcgttaaatgcaatatgaccgtcgttacctacaccgcccataaacagatgaatttttccgtaagaacggattttttcttcatactggcggcactcggcgtcgatatccggggcgttgccgttgagaaggttgatgttttctgctggaatatcaacgtgatcgaagaaattacggtgcataaagctgtagtagctttccggatgctctttcggcagaccgacatattcgtccatgttgaaggtgacaacgtgcttaaagctgacctggcctgctttatgcatttcgactaacgctttataggtggtcattggcgtgccgccagttggcaggcccagaacaaacggacgatcggcagtcggtttgaacgcattgatacgattgacgatatggcgagcagcccatttaccgacctgttcagcggtagtcagggggatcagtctcattattcacctcaataagtaaaatgtaagccgttggcggattaggcatctttaagcgtaacctggatttgcgcagacaggcgtcaatccgacctgattttttgaatgataaaataagttttctggtttagccagtaaaagggagtgatgataacgatatttggtgacaaaactcacaaaagacacgcgtttaatttgcgatacgaattaaattttcacacactctgtagcagatgatctaacaatctgattacagaacatcggcagtacaatttgcagcaaaataaaaatacggctttaaacgagccaaatagggttctcgtagggggaataagatgaatattttaggttttttccagcgactcggtagggcgttacagctccctatcgcggtgctgccggtggcggcactgttgctgcgattcggtcagccagatttacttaacgttgcgtttattgcccaggcgggcggtgcgatttttgataacctcgcattaatcttcgccatcggtgtggcatccagctggtcgaaagacagcgcaggtgcggcggcgctggcgggtgcggtaggttactttgtgttaaccaaagcgatggtgaccatcaacccagaaataaacatgggtgtactggcgggtatcattaccggtctggttggtggcgcagcctataaccgttggtccgatattaaactgccggacttcctgagcttcttcggcggcaaacgctttgtgccgattgccaccggcttcttctgcctggtgctggcggccatttttggttacgtctggccgccggtacagcacgctatccatgcaggaggcgagtggatcgtttctgcgggcgcgctgggttccggtatctttggtttcatcaaccgtctgctgatcccaaccggtctgcatcaggtgctgaacaccatcgcctggttccagattggtgaattcaccaacgcggcgggtacggttttccacggtgatatcaaccgcttctatgccggtgacggcaccgcggggatgttcatgtccggcttcttcccgattatgatgttcggtctgccgggtgcggcgctggcgatgtacttcgcagcaccgaaagagcgtcgtccgatggttggcgggatgctgctttctgttgctgttactgcgttcctgaccggtgtgactgagccgctggaattcctgttcatgttccttgcaccgctgctgtacctcctgcacgcactgctgaccggtatcagcctgtttgtggcaacactgctgggtatccatgctggcttctctttctctgcgggggctatcgactacgcgttgatgtataacctgccggccgccagccagaacgtctggatgctgctggtgatgggtgttgtcttcttcgctatctacttcgtggtgttcagtttggttatccgcatgttcaacctgaaaacgccgggtcgtgaagataaagaagacgagatcgttactgaagaagccaacagcaacactgaagaaggcctcaatcaactggcgaccaactatattgctgcggttggcggcactgacaacctgaaagcaattgacgcctgtatcacccgtctgcgccttacagtggctgactctgcccgcgttaacgatacgatgtgtaaacgtctgggtgcttctggtgtagtaaaactgaacaaacagactattcaggtgattgttggcgcgaaagcagaatccatcggcgatgcgatgaagaaagtcgttgcccgcggtccggtagcagctgcgtcagctgaagcaactccggcaactgccgcgcctgtagcaaaaccgcaggctgtaccaaacgcggtatctatcgcggagctggtatcgccgattaccggtgatgtcgtggcactggatcaggttcctgacgaagcattcgccagcaaagcggtgggtgacggtgtggcggtgaaaccgacagataaaatcgtcgtatcaccagccgcagggacaatcgtgaaaatcttcaacaccaaccacgcgttctgcctggaaaccgaaaaaggcgcggagatcgtcgtccatatgggtatcgacaccgtagcgctggaaggtaaaggctttaaacgtctggtggaagagggtgcgcaggtaagcgcagggcaaccgattctggaaatggatctggattacctgaacgctaacgcccgctcgatgattagcccggtggtttgcagcaatatcgacgatttcagtggcttgatcattaaagctcagggccatgttgtggcgggtcaaacaccgctgtatgaaatcaaaaagtaatctgctttatgcctgatgcgacgcttgacgcgtcttatcaggcctacaaaagctcagtccaggttggataagacgcttaagcgtcgcatccaacaatgacgcaggactggcaaaagcggtggagatcttctctgccgctttttttttcatcaatcatccccataatctcagtgagattttcgattttcactaactaacagttgtcagcctgtcccgcttataagatcatacgccgttatacgttgtttacgctttgaggaatccacgatgagtgaggcagaagcccgcccgactaactttatccgtcagatcatcgatgaagatctggccagtggtaagcacaccacagtacacacccgtttcccgccggagccgaatggctatctgcatattggccatgcgaaatctatctgcctgaacttcgggatcgcccaggactataaaggccagtgcaacctgcgtttcgacgacactaacccggtaaaagaagatatcgagtatgttgagtcgatcaaaaacgacgtagagtggttaggttttcactggtctggtaacgtccgttactcctccgattattttgatcagctccacgcctatgcgatcgaactgatcaataaaggcctggcgtacgttgatgaactgacgccggaacagatccgcgaataccgcggcaccctgacgcaaccgggtaaaaacagcccgtaccgcgaccgcagcgttgaagagaacctggcgctgttcgaaaaaatgcgtgccggtggttttgaagaaggtaaagcctgcctgcgtgcgaaaatcgacatggcttcaccgtttatcgtgatgcgcgatccggtgctgtaccgtattaaatttgctgaacaccaccagactggcaacaagtggtgcatctacccgatgtacgacttcacccactgcatcagcgatgccctggaaggtattacgcactctctgtgtacgcttgagttccaggacaaccgtcgtctgtacgactgggtactggacaacatcacgattcctgttcacccgcgccagtatgagttctcgcgcctgaatctggaatacaccgtgatgtccaagcgtaagttgaacctgctggtgaccgacaagcacgttgaaggctgggatgacccgcgtatgccgaccatttccggtctgcgtcgtcgtggttacactgcggcttctattcgtgagttctgcaaacgcatcggcgtgaccaagcaggacaacaccattgagatggcgtcgctggaatcctgcatccgtgaagatctcaacgaaaatgcgccgcgcgcaatggcggttatcgatccggtgaaactggttatcgaaaactatcagggcgaaggcgaaatggttaccatgccgaaccatccgaacaaaccggaaatgggcagccgtcaggtgccgtttagcggtgagatttggattgatcgcgccgatttccgcgaagaagctaacaagcagtacaaacgtctggtgctgggtaaagaagtgcgtctgcgtaatgcttatgtgattaaggcagaacgcgtcgagaaagatgccgaaggtaatatcaccaccatcttctgtacttatgacgccgataccttaagcaaagatccggcagatggtcgtaaagtcaaaggtgttattcactgggtgagcgcggcacatgcgctgccggttgaaatccgtttgtatgaccgtctgttcagcgtgcctaacccaggtgctgcggatgatttcctgtcggtgattaacccggaatcgctggtgatcaaacagggctttgctgaaccgtcgctgaaagatgcggttgcgggtaaagcattccagtttgagcgtgaaggttacttctgcctcgatagccgccattctacggcggaaaaaccggtatttaaccgcaccgttgggctgcgtgatacctgggcgaaagtaggcgagtaattttaagtttcgctatgccggatggggcgtttacgtcgcatccggcaaggaacagacaaacagtttcaaacgctaaattgcctgatgcgctacgcttatcaggcctacatgatctctgcaatatattgagtttgcgtgcttttgtaggccggataaggcgttcacgccgcatccggcaagaaacagcaaacaatccaaaacgccgcgttcagcggcgttttttctgcttttcttcgcgaattaattccgcttcgcaatttatccataaaataaatttaaaataacaaaacataattaaataaaatgtaaccgctttcatcttgctggaatttcacgcttttattcttctgcaagcctttcaaccgcaaacttaagccttgtaacaaaaatcatcaaaatatgtgcggttgctcatgttcttacattctggttacagaaagagattgataattcgcgtcgcgaaaaatagtctgttcctgtagtcagcgagacttttctcaacgctacttttttaatttttattttttcgctgttcacctttggtgcagcaatttatacgtcaaagaggattaacccatgcgtacgtttagtggcaaacgtagtacgctggcgctggctatcgccggtgttacagcaatgtcgggctttatggcaatgccggaggctcgcgccgaaggattcatcgacgattcaaccttaaccggcggtatatattactggcagcgtgaacgcgaccgtaaagatgttaccgacggcgacaaatacaaaaccaacctttctcactccacctggaatgccaacctcgattttcagtctggttatgctgctgatatgttcggccttgatattgccgcgtttacggcgattgaaatggcggaaaacggcgacagctctcacccgaacgaaatcgcgttttcaaaaagtaataaagcctatgacgaagactggtccggcgacaaaagcggtataagcctgtataaagcagcggccaaatttaaatacggtccggtttgggcgagggcaggttatattcagccaaccggtcagacgctgttagcgcctcactggagctttatgccgggtacttatcagggtgcggaagccggagcgaattttgattacggcgatgccggtgcgttgagtttctcctacatgtggaccaacgaatacaaagcgccgtggcatctggaaatggatgagttttatcagaacgataaaaccaccaaagttgattatctgcactcccttggggcgaaatacgacttcaaaaataacttcgtactggaagcggcttttggtcaggcggaagggtatatcgatcaatattttgccaaagccagctacaaatttgatatcgccggtagcccgttaaccaccagctaccagttctacggtacccgcgataaagttgacgatcgcagcgtcaacgacctttatgacggcaccgcctggctgcaggcgttgacctttggttaccgggcggctgacgtagtggatttgcgcctcgaaggcacctgggttaaggctgacggtcagcagggatacttcctgcaacgtatgactccaacctacgcttcctcaaacggtcgcctggatatctggtgggacaaccgttctgacttcaacgccaacggcgaaaaagcagtcttcttcggtgcgatgtatgacctgaaaaactggaatcttccaggcttcgccatcggcgcttcctacgtttacgcatgggatgctaaacctgcgacctggcagagcaatccggatgcgtactacgacaaaaaccggactattgaagagtctgcatacagcctggatgcggtctataccattcaggacggtcgcgccaaaggcacgatgttcaaactgcacttcaccgaatacgacaaccactccgacatcccaagctggggcggtggttacggcaacatcttccaggatgagcgtgacgtaaaatttatggtaatcgcaccattcaccatcttctgatgcccgacgcggcaggttttgtgcctgccgcacgtttgaggaatttgctatgaaaaaactgattctcatcgccatgatggcatcggggctggtagcttgtgcgcaatcaaccgcaccacaggaagacagccgtctgaaagaggcatacagcgcctgtatcaacaccgcgcaaggttcgccggaaaaaattgaagcctgccagagcgtgttaaacgtgctgaagaaagagaaacaacatcagcagtttgccgaccaggaaagtgtccgcgtactggattatcagcagtgtctgcgtgcaacgcaaaccggaaatgatcaggcggtgaaagccgattgtgataaggtctggcaggaaattcgcagtaataacaaataagtgagagctgtaactctcgcttttcttatttcccttgcataaaaaagccaacccgcaggttggcttttctcgttcaggctggcttatttgccttcgtgcgcgtgctcatcttcgcggcaatcgccttcggcacagtgaccgtaaagatagagactgtggttagtcaggcgaatgccatgttttgcggcaatttcacgctgacgcgcttcgatggaatcatcactaaattcgataaccttgccgcagtcgaggcagatcaggtgatcgtggtgatgttgctgtgtcagttcaaatacggatttaccgccttcaaaattgtggcgggtgacgataccagcgtcgtcaaactggttcagtacgcgatataccgtagccagaccaatttcttcacccatatcgatcagacgtttgtataaatcttccgcactgacgtgatggttgtccggctcctgaagaacttccaggatttttaaacgaggaagcgttactttcaggccagctttctttagggcggtattgttatcagtcatgcggaatctgtcctgttactaagcggttcacttcattagaagaagtgacagaatttgctcttgagataatgcgtatcattatagaattgccacgcctaaatgaaaaccacaagtccctggcaaatattgttaataaaaacgtggcatagcttacatttacaacggcaaggccacttgaacaccgggacattgtacaggtacaacagcaaaagttacaaatttgtagcaattattttgattggcattatctattaatacggcgtagacatgagtctacgccgcatcacatcaggcattgagaatttcgtcgagatgcaactcttcagaaatctgtttaacccatttttctacacgttcagcggtcagttccggctgacggtcttcgtcgatagccagaccgacaaagtggtcgtcatctgccagaccttttgatgcttcgaaatgatagcccgcagttggccagtgaccaacgatggttgcaccgcgcggttcaatgatgtcgcggatggtgcccaatgcgtcgcagaaatattcggcgtaatcttcctggtcaccacaaccaaacagcgcaaccagtttgccattgaaatcaatctcttcgagagtcgggaagaagtcatcccagtcacactgcgcttcgccgtaataccaggttgggatgcccagcagcagaatgtcataagcttccagatcttctttgctgctttttgcaatgtcatggacatcggcaacgtctttaccaagctgtttttgaatcatttttgcgatattttcggtattaccggtgtcgctgccgaaaaagatgccagtgatagccatgagtgaaataacctcttgaaacttattgaaatgggggtggaaaattgcccacggataaaggcaatcatagcagaacaggcagtcttgcggaatcagcaaacgagcaggactgcacactgtgctacatgaaagtggaaatttaaacgatgccctgactacgcagcgccgccagttgctgcattaacatctcttcgatcagttcgctacggctcatattgcgcgattccgccagctcgttcagcgcctcgacagcttccgcgttcagcttcagttcgacacgcttaaggccacgtactttgtcgcgttttagttggttgcgtttattaatacgcagctgttcatcgcgcgaaagcggattagttttcggtcgtcccggtcgacgctcgtgcgcgaacagatctaatgtcgtacggtccgtttgttctttggccatgatcttggtgacttcgggggaaacaatcagccaggcctctgcccggatggatagcgcgccataatacatcagcgcgatgagtcacgccaacgcccacgcgcggaaagcgacgcggacgctgggtttttaatcagttgcgttaatcattgagatagcgacggatagcgcgtaataccgcatctggtttttcagcatggacccagtgacccgcgcctgcaatgacatgcgcccgtgcctgtggaaattgtgccagtaaatcatcacggtactgctcgctaacatacggagaattaccaccagggataaacagggcagggtgatcccatgccgggattttctcccaacccacaatatgcggatactgatcccacaataccggcacgttaaagcgccactccccgtcaacaaaagatttcaacagaaactgaatcaccccttcttcattaagatgctggcgcattattgctgctgcttgctggcgagtttgtgcgtccgattcactgaccgcgttgatagctgcgaaaatctcatcatgacggcgtacgtgatagtcgaccggtgcgatatcgatcgccaccagtttatcgatgcgatcgggggccagtgcagtaagtgccattaccgctttaccgcccatggagtgaccgataaatgttgctttgtcgatctgcagtgcatccagggtatcaacaagatcctgcgccatcgccgggtaattcattaccggctctctcggtgaaagaccgtggttacgcatatcaacctggatgatattgtgatcgtttaccagatcgcgagccagtacgccaaggttgtcgaggctaccaaacagaccatggacaagaacgatgggagaattattgtgctggttttgtgcagtttgcgcgcggatattcaatttcatggcaaagttctttttttcgcgttgtcgggttagggtattatgttgaccattgtgccacagggctgcaacaaataaggtttattccgagtttttctgcaagccaggcttgacgctatccgctgccgggatttattcatatactcctggcgacttgtattcagctaagacactgcactggattaagatgaaaacgattgaagttgatgatgaactctacagctatattgccagccacactaagcatatcggcgagagcgcatccgacattttacggcgtatgttgaaattttccgccgcatcacagcctgctgctccggtgacgaaagaggttcgcgttgcgtcacctgctatcgtcgaagcgaagccggtcaaaacgattaaagacaaggttcgcgcaatgcgtgaacttctgctttcggacgaatacgcagagcaaaagcgagcggtcaatcgctttatgctgctgttgtctacactatattctcttgacgcccaggcgtttgccgaagcaacggaatcgttgcacggtcgtacacgcgtttactttgcggcagatgaacaaacgctgctgaaaaatggtaatcagaccaagccgaaacatgtgccaggcacgccgtattgggtgatcaccaacaccaacaccggccgtaaatgcagcatgatcgaacacatcatgcagtcgatgcaattcccggcggaattgattgagaaggtttgcggaactatctaaaacgttgcagacaaaggacaaagcaatggcaatccacaatcgtgcaggccaacctgcacaacagagtgatttgattaacgtcgcccaactgacggcgcaatattatgtactgaaaccagaagcagggaatgcggagcacgcggtgaaattcggtacttccggtcaccgtggcagtgcagcgcgccacagctttaacgagccgcacattctggcgatcgctcaggcaattgctgaagaacgtgcgaaaaacggtatcactggcccttgctatgtgggtaaagatactcacgccctgtccgaacctgcatttatttccgttctggaagtgctggcagcgaacggcgtagatgctattgtgcaggaaaacaatggcttcaccccgacgcctgccgtttccaatgccatcctggttcacaataaaaaaggtggcccgctggcagacggtatcgttattacaccgtcccataacccgccggaagatggtggtatcaagtacaatccgccaaatggtggcccggctgataccaacgtcactaaagtggtggaagatcgtgccaacgcactgctggccgatggcctgaaaggcgtgaagcgtatctccctcgacgaagcgatggcatccggtcatgtgaaagagcaggatctggtgcagccgttcgtggaagggctggccgatatcgttgatatggcggcgattcagaaagcgggcctgacgcttggcgttgatccgctgggcggttccggtatcgaatactggaagcgcattggcgagtattacaacctcaacctgactatcgttaacgatcaggtcgatcaaaccttccgctttatgcaccttgataaagacggcgcgatccgtatggactgctcctccgagtgtgcgatggcgggcctgctggcactgcgtgataagttcgatctggcgtttgctaacgacccggattatgaccgtcacggtatcgtcactccggcaggtttgatgaatccgaaccactacctggcggtggcgatcaattacctgttccagcatcgtccgcagtggggcaaagatgttgccgttggtaaaacgctggtttcttctgcgatgatcgaccgtgtggtcaatgacttgggtcgtaagctggtagaagtcccggtaggtttcaaatggtttgttgatggtctgttcgacggcagcttcggctttggcggcgaagagagcgcaggggcttccttcctgcgtttcgacggcacgccgtggtccaccgacaaagacggcatcatcatgtgtctgctggcggcggaaatcaccgctgtcaccggtaagaacccgcaggaacactacaacgaactggcaaaacgctttggtgcgccgagctacaaccgtttgcaggcagctgcgacttccgcacaaaaagcggcgctgtctaagctgtctccggaaatggtgagcgccagcaccctggcaggtgacccgatcaccgcgcgcctgactgctgctccgggcaacggtgcttctattggcggtctgaaagtgatgactgacaacggctggttcgccgcgcgtccgtcaggcacggaagacgcatataagatctactgcgaaagcttcctcggtgaagaacatcgcaagcagattgagaaagaagcggttgagattgttagcgaagttctgaaaaacgcgtaaacacatttaataaaaaaagggcggtcgcaagatcgcccttttttacgtatgacaaacacagaattgcctgatgcgctacgcttatcaggcctacgaggatggtgcaatatattgaatttaagcgattttgtaggccggataaggcgttcacgccgcatccggcaaaaacaacgaacactttgtcaacaaactgagtagctcaaggaaatcccaatgaagaccaacaggagtctggtcgtcatagtgtcactaattaccgccacattactgctgactgcatgcgcccaacctgaacaatcatcattagctggcgactggttactgacccctaaagataaaaccagaggattaacgggtagcattgcggtaaatattgcacctttccggtgtaagacaaattgccgtggtgataacttacctgataatacccgccgctggcagttgtcaggcgggaacgaaaaagaacttacttatcttcataatatgtcagcacaagaaaaggtcggtttaaatcccggttggcaatgctacacctcattttttatgcgggtttgccagggcaagcccggcactcgaccgatagtcaatgaggattatgtcagcgaaagcggattttttggctcgatgatgcatgtcgggattattgagttacgacgctgccagtcagaaaattgccagcaagaattgaaagcgataaatacacattaaaatagtgagtccgggaatgaaacccggacctgaacatgtcttattgcgtgaatgtttctttcatttgatactgcatttcccagagttcagtaagcgaaataacttttcttgttcttgcttcttcactttgtacccataagaaagggtagaacgtgaaggcttccgttgccgataattttattacgtcttctcgccattgctgccatcgtacattttcatagaaggtatctaaatcaccggataatgcccactgaagaaactcagaatatccaacttccagactttcccaattcagcgtatctggcgcaaaataataaacgcagccagtatcttccccaagatcgccaccattaagagcaaaaattccccctgcgacatcgtcagcgatgggtaaagcccgcacgcctgcgaattcagggcgttgtgtccaacttactggatctcgtggcaaccgggggtgaccagatcctgctatgcgtaaccaaccattatcaatcagcagacctccggagccatagacaagcgcacccatcggtgattttgttgtcacctgtaattgataaagtgcggtttcggctaaatctttattaaccggtaagagttcggtatggtttgtggcgtcttttaaccagttctggattattggccaggctgaatcttcagtatttactaactgattcatttcacgcatcgctacttgctccttgtgtgctacggtgtcatttatgatgaggaattgtatggaacattttttaaatattaagttccttatatttgaataaaaaatgactttatccatacattgccacttttttcaaagcataaaccgatacccaataccggtttcagtaataaaatggcgaggccgggccggatcctgttccagtttttgtcgcagatgccccatataattacgcaaatagttgctgtgttcgatcgcgtttagaccctacatctgccggatgcggcataaataacgaactatttgccaacaaacagaaagggcgatcattcaatcgcccttttttactttgttttattaaccgtgtttatttttcagttcaaagcgtggtgataccagaccatacagtgtccaaccaaggaaggtcacgatggaaccgtacagcatggcttcttccccggatgagtacagcgcataaaagctatacatcgcgccaacaaaagcaacaaagtttgcaactttcgcttttgaggggggcacattagcgaccttctgaataatgactaatgccgccattgacagaatatacggaatgatattggtcaccacggccaggttaaccagcacgttgaactgactgtttagcgacgggctaatggtcatcagtgccaatccactctgaataatcacaatggtcaacattccctgcaccggtgcatccactttggttacacgggagaaaattttagggaagtagccttcatcagatgaagatttaaacacctgggcaatggtgaactgccagccaagtagcgaaccgcagcaggacatcaccatcagcgccataatgactttacccacttccggcgtgaacatctgcgcgaaggccagaccaaatggtgccgttgaatttgccagctccatatttggcacaatcccggcaatcacgttggtggagacgatataaatcaccgccgcacctaacgtaccgccgagtaccgcgattggcacattacgttccgggttttccactacatcagtattcgcacacgcagactccagaccaagaaaagcccacagcgtcatagcgatggaagaacctaccgcactgaagaacggtgcatgatgcggattccaggaatcaacgtacagcgtcgggctaaaccagaaccagccaataatgcacagaccgacgaccggaataatgaccccccacacggtaatgctactgatttgcccggtaatgcgcgcaccaccaaagttagccacggtacaaatccacagcaccccgatggtcgcaagaccaatctgcactggcgacaaactcgcgccgagcagttcggtgccgtaaccaaccgccgaaatagcaatcgcgacgttagcaatcagcagtgagacgccgtaggtatagttcgccataaagttaccggatttaccgaaagcatactcggcataaccgcccataccgcctgatttacggctgaacataccgcattttgcgaatgcccatgccagtgccattgagcctacggctgtcaccagccaggagataattgagattgtcccgacttcggcaagctttgtcggcagcatgatgataccggagcccatcatgttgaccatcgtcagtatggttaactgaacgacgcccattttgttcgatttagcctgactcataatttttcccctttcaacagggtgctttgcgcatcacgaggcttgatgacatagcaccaaacttgcttacgaccatcatgttcttcgatatagacaccctgcagctccggtgcaaaacctggcagcaggttgatcccttcttccagagcgctgaagtaacgcagaacagcaccaccccagatttcacccggaacaacacacagcacacccggaggataaggaagcgcaccttcggcagcgatacggccttctgcatccggcagacgaaccagttccacttcaccgcgtaaataggcgtagttggcttcttgcggattcatgctgacgcgtgggaagtgctccttacggaacatctctttttgcagttgtttcacgttgtggcgggcatacaaatcatgcatttcctgacacaactgacgcagggtataaccggcgtagcgctcttcatgctgtttgtagatggaaggtagcacttctgctaatggcgcgtcggactcaagcagtttttcgaagcgtaccagcagggcaacaagttgctgaagtttggccatatcttctgccggagtcagcaggaagaggatggagttaagatcgcatttttccggcactacgccattttcgcgcaggaagttagcaagaatcgtcgcgggtacaccgaacgcttcatattcgccgttacgtgcatcaatacctggggttgtcagcaacagtttgcatggatcgacaaagtattgattctctgcatagccttcaaaagaatgccagtgttcccctggtacaaactggaagaagcgcagatcaaccgcaatttgcgctgtttcatacgactgccagggtttaccatccaccagttcaggtacgaacggacgaatatgctgacagttatcgaggatcagtttgcgggcattaatgccatttaccacacaatccatccacatattacgaccgctgacaccttcatgcattttggcgttgatatccagtgcggcaaacagcggatagaacgggctggtggaggcgtgcatcataaaggcgttgttcatgcgtttgtgcggtacataacgctgttgccctttgatgtggctgtcttttttatgaatttgtgaagtctgagaaaaaccagcctgttgtttatgcacagattgcgtaaccagaatacccggatcgttctcattaagatccagcaacagcggcgaacagtccgccatcatcggaataaactgttcatagccgacccatgctgagtcaaacaggatgtagtcacacagatgaccaattttatccaccacttggcgggcgttataaatcgtaccgtcgtaggtgcctaactgaatcacagcgaggcggaaaggacgagcctcttttgcccgctgcggtgcgacttccgcgatcagctcacgcaggtaactttcttcaaaacagtgcgcatcaatgccaccgataaagccatacgggttacgtgccgtttccagataaaccggtgttgcaccagcctgtagcaacgctccgtggtggttagatttgtggttattgcgatcaaacagcaccagatcacccggtgttagcagggcgtttaaaaccactttgttagaagatgaagtgccatttaaaacgaagtaggttttatcggcattaaacacttttgccgcatgttgctgtgcaatgcatggcgcgccttcgtgaatcagcagatcgcccatcgctacgtcggcgttgcacaagtcggcacggaacagcgcctcaccaaagtattccacaaactgattccccgccggatggcgacggaaaaattcgccgccctgatgaccagggcaatcaaacgcgctgttaccttgattgacataatcgaccagtgcgcggaagaaaggtgggcgcagttgagtttcataatggctggcagcggtttctaactggcgaccataaaattctcgtcgcgattcgcaattctcaaagacacccgaaatacggggcaaatactctgcgggtacacgttcttgattttcagtagcaataaataccgggatgccataacccgtggcatcgatttcatcgagttttccgcatgtaacatcgttgagcgataaaactattgccgccacatcgatattacgactttcattaatgtagatacattctcgctgcgtggtaaaacagtccgggcaagaatcactaaccgcaatttttaattttgacatttttcatctctttattttaggtaatagcaggtcctcaatttctcgaatgagaaatcgatcgtgccggaaaaaagcaaagttaccccgctgataaataaatcaggtagattgcttttttcagaatgcagaaacccttaccagtcaggtggctgataatacaagggttaacagagaatgagcactgcggaatacaggcatatgcctgtaatacagagagtcaggaagacctgtacgctgaagtgcccttagtcggtagactaacgggcattgaagaagtgaaagtcgaagctattgcgatgagcaaacttcataatatgagttgtccgccttatatggggcatagtgcggctgttattttccatttaatttacctttcctgatgtgaatgaaggtgaagatattctatccaggaaatacggttgaactgtgaaggtgatcaataaaaaatgatcaatcttaatttatttaatgatgagctttttactcagtaatataaaatattgaattgttatttttgtgtgttgtttaagataaaaagccgtatttattattacggctttaattaataaaaggcaggctgtattaaaattaatattcaaagcataaaccgatagccaataccggtttcagtaatgaaatggcgtgggcgggcgggatcctgttccagtttttgtcgcagatgtcccatataaatacgcaaatagtgactgtgttcgaccgcgtttggcccccacacctggttaaggagctggcgctgggtgagtacttttccggcattgttgagcagcaccgccagcaggcggaactcaattggtgtgagatgcacctcttcctcaccccggtgaatcacgcgggcggctaaatcgacggtaacatcggaaaattttaccagcggatcgggcgcggtggtggcagagtggcggcgtaatgcgacgcgcagacgggcctgcaattcgccaatgccaaacggcttactcagataatcatccgctccggcatccagcgcggcgattttgtcgctctcttcgctgcgtgcggaaagcacaatcaccggcaccgcgctccactggcgcaggtcgcggataaactcaaccccatcaccatcgggcaggccgagatcgagaataatcaaatctggcttacgggttgccgcttccagcaagccgcgttgcagcgtttcggcctcaaagacgcgcatcccgtcgccctccagcgccgtgcgcagaaagcgacgaatagcctgttcatcttcaacaatcagaacgtttgtcacatatcctcatgaaattcttcaagttcaggggcagtttgctggggaagtgtaacacgaaaacaggcaccaccttccggtcggttgaacgcggtaatagtgcccccgtgtacatccactatcgcccgacaaattgccagtccaagccctacccccggtactgccgactctttattcccgcgagcaaacttatcaaatatcgtctgctcctggcctggcggaagaccggggccgttatcccagacatccagttgtagattttcgccctcaacgtgggcatcgataccaatttcggcctgcgcacccgcatatttcaccgcgttctccagcagattaatcagcacccgttcaaagagtggcccgtcaacgtggattaaggtcagcggttctggcagagaaagattgatgggcgacgataaacccggttccagcatttgcagcgcgctgccgactacttcttccagcgttaaccactctttcttcaaattaaagccgccggactgaattcgcgccatatccagtagattattcaccagtcgggtagtgttcagcacatgctgacggatctcgctggcctggcgggcgtggggtgatccttcgcttgccagatcgagcgttaagatttctgcctgaccaaacagcaccgtaagcggcgtgcgtaaatcatgcgaaagcgccgccagcagggcgttgcggatctgttcacgttcgcttgccatccgcgcctgttcttcgctggcggttagcgtcagccgctcaagggcattggcgactaacagcgtaaacgtctccagcaggcgctgctgttccgggatcatcaactggcgcagattccccggctccaccaccaccagcccgtaggttttctcgccgctttttagcggcaaaatctggtacggtacaccgggtaacgtgtcggtgcccgcgcccgcaggcaggcctttatcaaaactccactgcgcgatggcatcgtcccacggcgtcattccttgcggatgtgttaacggctgcaatttaccgttgtcatcgggcaacaacacctgactgcgggcatgaaacgtggaggcaataaattgttcgctggtggcagcgatatcctgcggactgcggcccaccgccagagctttcgacatttcatataagtgccgtgtgcgttgctcgcggtaacgggctacccgcgcctgataacgcacgccagcagtaaggttcccgatcaccagcccgacggttaacatcaccgcgaaggtcagcagatattgcacatcagagacggcgagcgtgccgcgtggggcgataaaaaagagatcgaaactcactacattaatgacggtggcaaccactgaaggccagcgtccataaaatagcgccaccaccaccacgccaagcagatacagcatcaccaggttggcggcatcaaacgccatcagccactgcatggcaattaaggtgataacggcgcataacgcggcggcaaccacgcatccctgaatttgtacacgccacttgtctttaaaagagcggttatccggcgcgttgttaatcgtgcgggcgggtggttcatcaagcgcgaccagcacctgatcgagatcgggggcgatgcgcgccagtcggtcagcaaacgtttcccgacgccaccagcggcgcgaggccgggcgaccgagaataatcttgccgagattatgttcacgggcataacgcactaccgctttctcttccgctggatcagaaagtgttgccgtctccgcgcccagttcctgcgccagacgtaaggcgctgagaattgcccgacgttttttttccggtaagcggtgcagggcaggggtttcaacatacaccgcgtgccagacgctacccagccgtgacgccagccgcgccgctgcgcggaccagtttttcgctgccggtgttatggccgatgcataaaaggatcgcgtcgcgcgtgtgccacactttctcttcgccaggatgcccccgccaggcgcgcatttgctcatcaacgcgatcggcagtacggcgcagtgccagttcgcgcagggcgatcagattacctttgcggaaaaaatgttcaatggcgcgctccgcctgcccggcaatatagactttgccttctttcagccgctggcgcagatcgtccgggggcaagtccaccagcaccacgtcgtcggcggcatcgaaaaaaggatcgggcacggtttcccgtacctgaattccggtgacgccgctgaccacatcattcagactttccagatgctgaacgttgacggtagtgaaaacatcaatgccagcttccagcagttcttcgatatcctgccagcgtttgggatgacgggaacctggcgcattactgtgcgccagttcgtccattaagatcagcgccgggcggcgggcgagggcggcatcgagatcaaactcgctgatatgccgcccacggtacgcctggcgttttaacggcagaacagccagcccttccagcatggcggcggtatcttttcgcccgtgggtttctaccacgccaaccacaatatccagcccttgcgcccgcagtcgctgggcttctgccagcatcgcccaggtcttcccgacgcctgcacaggcaccgaagaaaactttcagcttcccccgatgcggcgcggcagtttgttccagcagacgatcggggtcgggacgtaagggttcgttattcatcaagtttatccagcgccagattgagttcaacaatgttgacaaccggctggccgatatatttcaccagcggttgttggctgtattttgcgatcagttgcgtgagctgttcaacgctgagattacgcgctttcgccacgcgtgggatttgccaggccgccgcttgcggggtgatattattgtccagcccgcttgccgatgccgtcaccagttcaaccggaacgctcgcgctggcatccgggttagcggcccgtaatgcagcaacgcgtgcggctattagtttatccagctcagggttactgaccgccagattgctcccgccagaagcctgtggattatagggcatttctgccgttgccgacgggcgaccatgaaaatagccgttgccggtaaaattctgcccgattaatgccgaaccgcgcaccgtatcaccttcacgaatcaacgaaccattggcctgccagggaaaccaccattgccccagtacggtggtcagcagcgggtaaacgccgccagtaatcaataacagaaagataaatgttgataatgccggacgtaatccactcatggtaaacctcacaccagaccgcaaacggtcagcagtaaatcaatgactttgataccgataaacggcaccagcagcccacccagaccgtaaatccataagttacggcgcaacatggcagaagcggtaagcggtttataactcacgccttttaacgccaggggaatcaaaaagacgataatcaaggcgttgaaaatcaccgcactgaggattgcggagtcgggcgaatgcaggcacatgatgttcagcgcatttaactgcggatacgttgccgcgaatgccgccggaataatggcgaagtatttcgccacatcgttggcaatgctgaaggtggtcagcgagccacgggtcatcagcatctgtttgccaatgtgcaccacctcgatcaacttggtcgggttagagtcgagatcgaccatattgcccgcctctttcgccgcctgggtgccggagttcatcgccaccgcgacatctgcctgcgccagcgccggagcatcgttggtgccgtcgccggtcatcgctaccaaacgaccttccgcctgatactgacggatcaatgcctgcttggcctccggtgtcgcttcggcgagaaaatcatcgacacccgcttccgcagcaatcgcggcggcagtcagacggttatcgccggtaatcatcaccgttttaatgcccattttgcgcagctgggcgaagcgctctttaataccgcctttgacgatatctttcagcgcaataacgcccagcacacgagaaccttccaccaccaccagcggcgtggctccctgacgcgcaacctgatcgactttttgatcaacatcggtagggaagtgaccaccgttagcctcaacatggcgacgaatggcatcgacagaacctttacggatcatgcggttgtcgatgttgatcccgctcatccggctttgcgcagtaaacggtacaaaggtggcatggagcgactgcacatcgcgctcgcgcaggttaaaacgctgcttggcgaggatcacaatactgcggccttccggcgtttcatcagccagcgaagccagttgtgcggcgtcagccagcgttttttcatccacgccctgcgcggggataaactccgacgcctgacggttaccgagtgtgatggtgccggttttatccagtagcagaacgtcaacgtcacctgccgcttcaactgcacgtccgctggtggcaatcacattcgcgcctagcatccggctcatcccggcgacgccgatcgctgacaacaggccgccaatagtggttgggatcagacagaccagcagcgccaccagtaccgttacgctgactgcattaccgccccacgcggaaaacggccacagcgtggcggttgccagtaaaaagacgatagtcagggcaatcagcagaatggtcagggcaatttcgttcggcgttttgcgtcgctgtgcgccttccaccatcgcgatcatccgatccagaaatgtctcgccggggttaacgctacactcaatcaccagccagtcagaaagaatacgcgtgccgccggtgacggaggcaaaatcgccgccggattcacggatcaccggtgccgattccccggtgatggcgctttcatcgaccgatgcactcccttcaataacttcaccatcgcaggggataatatcgccagcttctaccagtacgatatcgcctttacgaagttggtcggcaggaactttgtccgccgcagcgccatatttcggctcacgcagcttgcgggcaaaggcagtttttttcacccctttcagactgttggcctgcgctttactgcggccttctgccagcgcctcggcgaaattagcgaacagtacggtgatccacagccaaccgctaatggccgcgctaaacagcgcattgccgggcatcgcaccgcttgccatcgcgatgctaatacaggtggtcagcagactgccgatccagacgataaacatcaccggattgcgccattgcgcctgcgggtttaattttttcaccgcttctttcagcgcctgaacgacaagtgttggttcgaatagcgccagttgtttacgactcatattcagtgctcactcaatatcatcaggagagatattccgccaccggaccaagcgccagggcagggataaaggtcagtgcgccaaccagcaacacggtgccgattaacaggccaacaaacagcgggccgtgcgttggcagcgtgccggagctggcggcttggctctttttactcaccagcgaaccggcaattgccatcaccgggataatcaccccgaagcgaccgacaaacatgcagaacgccagtaaacagttccagaacggagagttggcgcttaatccggcaaaggcgctgccgttgttgttagcggcggatgacacggcgtacagcacttcgctaaaaccatgcgggccagggttgagcatggcgctacgtccggcgtcggtcatcatcgccaacgccgcgcccatcagcaccagcgtcggggtaaccagaattgccagtgcagtcagtttcatctcgcgtacgtcgatttttttacccagatattccggtgtacgaccaatcatcagcccggcaataaacaccgccagcaggacaaacagcatcatgccgtaaagaccagaaccgacaccgccgaacaccacttcaccaatttgcatcagccacatcggcaccatgccaccgagagcggtaaacgaatcatgcatcgcaatcaccgcgccacaggaagccgccgtcgtcacgaccgcaaacaggctactgaccagcacgccgaaacggctctctttaccttccatattgatgctgctgtccgtgcccagtgccagcagatgaggattaccctgaacttctgcccacatcaccacgcctacgcagatgacaaaaatcactgacatcgcccacagcaacatgcgcccctggcggcgatcgcccgtcacttcaccaaaggcaaagcacagcgccgttgggatcaagaagatcgccagcatctgcacgaagttggtcagtgcggttgggttttcaaacggatgcgacgagttggcattaaagaagccaccgccgttagtaccgagcatcttgatcgcttcctgagaagctacaggccccatgggtaacagctgttgcgctccttcaacggtattcacagcctgataaggcagaaagttttgcagcgcaccttgttgaataaaaaacagtgcaatcaacaacgccacagggactagcacccataacgtgatgcgtagcagatcgacccaggcattcccgagcgtgctcatgctctggcgggtaaacgcacggatgagggcaaaaatcaccgcaatcccgctggcggcagaaagaaagttttgcaccgttaagcccgccatctggctgaaatagctcaacgtggtttcaccgctataagattgccagttggtattggtgacaaagctgacggcggtattcagcgccagatcccacgacagccctggcaactgctgtggattaagcggcagatagtgctgaccgagcaacataaaaaacagcaccgccagccccagcatgttcaggccgagaatggcacaaagatattgcttccagttcatctcacggtcagagacgccaagtgcgcgaaaaagtacgcgctcaacgcccgttgtaccgggaagaggaatgtcattaatcagccgcgccagcccgctgcctaaaggacgcgccagcaccattaacaccagtaaaaacgtggcgatcagtaagaacccttgcgcagccatcagaacgcctccgcattgatcagggcataaaccagataacccagtaataaaaacaccagcaatacgccggttatcacgcctgcactcacagtgcacctccagtggcctaaaagtgataccggaagggtagaattctggctgcaaagatttcgcaaaaatctgcgggcggggtgtaaaaaaagtataaaaatggcaaaagccatgatttaactaatgtttagtattaatttaacttttgtgtaacttaattacaggatgaatgtaaataaaccatcaataagcaaaaataagtggtcggatgagtagtaaaattacacaaaaggcggtactattttcatcagataaacaaattcatttttccggtgccattcaccgggtagatacaaaagggggagaaaagtatggaactctacagagaatatcctgcatggcttatctttttacgccgtacttatgcggttgcagcgggcgttctggcgctgcctttcatgcttttctggaaagaccgcgcccgcttttacagctacctgcatcgcgtctggtcgaaaaccagcgataaaccggtgtggatggatcaggccgaaaaggcaactggtgatttttattgattgctgagttttgaatacattgaaaaccgccagcggaaacgctggcggttttttgtatcaggaagatgttcagaggaatatttagacatcgttataccaatcgaaacatatattcatgaaatatatataaatattttcctaattgttcttatctgacagatatctcacttaaggctttcttataaatctgtagggtttcgcctgtcagcagacaaataacccgataaaacaaggatgagcagatgagcggaaaaccggcggcgcgtcagggcgacatgacgcagtatggcggtagcattgtccagggttcagccggggtacgcatcggtgcccccaccggcgtggcctgttcggtgtgccccggcggggtgacgtccggccatccggtcaatccgctgctcggtgcaaaggtccttcccggtgaaaccgacatcgccctgcccggcccgctgccgttcattctctcccgcacctacagcagttaccggacaaaaacgcccgcgccggtggggagcctcggccccggctggaaaatgcctgcggatatccgcttacagctgcgcgataacacactgatactcagtgataacggcggcagaagcctgtattttgagcacctgtttcccggtgaggacggttacagccgcagcgagtcactgtggctggtgcgcggcggcgtggcgaaactggatgaaggtcaccggctggccgcactctggcaggcgctgccggaagaactccgcttaagtccgcatcgttatctggcgacaaacagtccgcaggggccgtggtggctgctcggctggtgtgagcgggtgccggaagcggatgaggtgctgcctgcgccgctgccgccgtaccgggtactgaccgggctggtggaccgcttcgggcgcacacagacgttccaccgcgaagccgccggtgaattcagcggcgaaatcaccggcgtgacggatggtgacggtgcatcatccgcagacgaatgaactgctctggcagcatgagaccagacatgcgtacaacgcacagggactggcgaaccgctgtataccggacagcctgcccgccgtggaatggctgacctacggcagcggctggctgtcaggcatgaaactcggcgacacaccgctggtggagtacacccgcgaccgcctgcaccgggaaacgctgcgcagcttcggccgttatgaactcaccaccgcttatacccctgccgggcagttacagagccagcacctgaacagcctgctgtctgaccgcgattacacctggaacgacaacggcgaactcatccgcatcagcagcccgcgccagacccggagttacagctacagcaccaccggcaggctgaccggcgttcacaccaccgcagcgaatctggatatccgcatcccgtataccacagacccggcaggtaaccgcctgcccgacccggagctgcacccggacagcgcttgcgaagcaacggcccggagggtggcgggcaggacgcccgccataaactgccaggcatcaaattaagcagaaggccatcctgacggatggcctttttgcattggtgcagaaaaaaatgccggatgcgacgctggcgcgtcttatccagcctactcttgcttatccgttctgcttttgcatccactccaccacaaaatcagccagcccctcaacatcattaatatccagtaatgcgacatcaagattaagcggcacatcactggctacagcaataacatgcctgtctatcactaattcttcaggtcgatgtccggctccatcgcgaaacagcacaatctttgcgatctcttcatgcttaaacccttcgaccagaatcaaatccagctttgaggtatccattcgacttgcgagaaactgtagatccagctcttcttcgtctggtgtttccgtcatcaaggcccatcgttgctggctggcaacgatggtttgtgccgcgccagccttgcgcagctcatagctatctttgcctggcttatcaacatccatatcatggtgcgtatgcttaatcagccctggacggatccctctggcgcataatgccgggatcagttttttcaaaagcgtagtttttccggtaccactccacgcggcaaaggcgagtaacggtatcatcgtttttcctgccatcgggcaagctcctctggcgtattcacgttaacaaatgcatctttatgatcgctgaaatcaaccgcatgaccgccagccagacgcataaatgccattacccggcgttctcctgcttgcagatattccagtaataaaggctcaatagcgcggtttaccagagcaatagtcgggtgatcgcgttcaccgtcatggacccacacgacaggcgcatctttgcgctgatgattaagccttgctgctaaatcagggggaatgtaaggcgtatcgcacgggcaaaacaaaaaccactcaccagcttcctgctgcattactgaaagcattcctgccagagggcctgggtaatccgccagtgaatcttcaatcactttcagaccgcctgcctgatagatttcctgatgacgattagcattaaccacgacgtgagagagctgcgtcataagcgcgtcagcgacatgttgccataatggtttgccgtttaattcaagcaatcctttatctacgccgcccattcgtctggctttaccgcctgccagcacaacgcctgttatcgtcgttatcagattcaccgatatcgcctcttttattgtgggattgaccctgctaacgtgtctgtctcaagagtaaggagcatcactatgaaatgtaaacgtctgaatgaagttattgaactcctccagccagcctggcaaaaagagccagaccttaacctgttgcaatttttgcagaaattggcgaaagagtcaggttttgacggcgaactggcggatttgacggatgacattctgatctatcacctgaaaatgcgtgattccgcgaaagatgcggtgatcccgggtttgcagaaagattatgaagaagacttcaaaacggcgctgttacgcgctcgcggcgtaattaaagagtaaaagcttgtaagcggcgccaccaaaatcatcgtgaaatgatatccttcatcattcgtaatgttttccggatgatgggatgaacaacagcgcttttactttccagacactacacccggataccatcatggacgctctgtttgagcaagggatccgggtggattccggtcttaccccgcttaacagctatgaaaaccgtgtctatcaatttcaggacgaagatcgtcgacgttttgtcgtcaaattttatcgtcctgaacgttggacagccgatcaaatcctcgaagaacatcaatttgcgttgcagctggtaaatgatgaagttccggtcgcagcacctgtggcttttaacggtcagactttattgaatcatcagggattttatttcgctgtttttccaagcgtcggtggtcgccagttcgaagctgataatatcgatcagatggaagcggttgggcgttatttagggcgtatgcaccagacggggcgcaaacagctttttatccatcgcccgaccatcggtctgaatgaatatctcattgagccacgcaagctgtttgaggacgctacactgataccttccgggttgaaagcggcattcctgaaagcgacagatgagctgatcgccgccgttacagcacactggcgggaagatttcaccgttctgcggctacatggagactgccacgccgggaatattctctggcgcgatggtccaatgtttgttgatctggatgatgcacgtaatggtccagctattcaggatttgtggatgttgctcaatggcgataaagccgagcagcggatgcaactggaaactattattgaagcttatgaagaatttagcgagttcgacaccgctgaaatcggactgattgaacctttacgcgccatgcgtttggtttattatcttgcctggctaatgcggcgttgggctgatcccgcgttcccgaaaaatttcccgtggttaaccggggaagattactggctacgacagacggcgacttttatagaacaggcaaaagttctacaagaaccccctttgcaattaacaccaatgtattaatcggagagagtagatcatgaaaaagatttggctggcgctggctggtttagttttagcgtttagcgcatcggcggcgcagtatgaagatggtaaacagtacactaccctggaaaaaccggtagctggcgcgccgcaagtgctggagtttttctctttcttctgcccgcactgctatcagtttgaagaagttctgcatatttctgataacgtgaagaaaaaactgccggaaggcgtgaagatgactaaataccacgtcaacttcatggggggggacgtcggcaaagatctgactcaggcatgggctgtggcgatggcgctgggcgtggaagacaaagtcactgttccgctgtttgaaggcgtacagaaaacccagaccattcgttcagcatctgatatccgcgatgtatttatcaaagcaggtattaaaggtgaagagtacgacgcggcctggaacagcttcgtggtcaaatctctggtcgctcagcaggaaaaagctgcagctgacgtgcaattgcgtggtgttccggcgatgtttgttaacggtaaatatcagctgaatccgcagggtatggataccagcaatatggatgtttttgttcagcagtatgctaatacagtgaaatatctgtccgagaaaaaataattcaatgtaaattacataaagcccgtgaatattcacgggctttttttattatttaataaatataaatacattctgataatgcatcctgccgctggacattatttcagcataagtggatattcaaagttttgctgttttatcagggaatatttatatgatacgtaagtcagctacaggtgttattgttgcgttagccgtaatctggggtggtggcacatggtacacaggtacgcaaattcagcctggtgtcgaaaaatttattaaagattttaacgatgctaaaaagaaaggtgaacatgcctacgatatgacgttaagttatcaaaattttgacaaaggcttttttaattcccgttttcaaatgcaaatgacattcgataacggtgcacccgatctcaatatcaagccaggccagaaagttgtatttgatgtggatgttgagcacggtccgttgcccatcacaatgttaatgcatggtaatgtcatcccagcactggcagcggcaaaagtgaacttagtgaataatgaactgacacaaccgctatttatcgccgcgaaaaataaatcgcccgtggaagcgacattgcgattcgcgtttggtggctcattctctacgacattagatgttgcccctgcagagtatggaaagttttcttttggtgagggccagtttacttttaatggtgatggtagttcattgtctaacctggatattgaaggcaaagtcgaagatattgttctgcaattatcaccaatgaacaaagtaacggcaaaaagttttaccattgattctctggcgcgattagaagaaaagaaatttccggttggtgaaagcgagtcgaaatttaatcagattaacattatcaatcacggggaagacgttgcccaaatcgatgctttcgttgcaaaaaccaggctggatcgcgttaaagacaaagattatatcaatgtcaatctgacctacgaacttgataagttaacaaaagggaatcagcaactcggtagtggtgagtggtcattgattgctgaatctattgatccctcagcagtgcgccaatttatcatccagtataacattgcgatgcagaagcagcttgctgcacatcctgagttagcaaacgatgaagttgctctgcaagaagtgaatgctgcattgttcaaagagtatttaccgttattacaacaaagtgagccggccattaaacaaccggtaagatggaagaacgcactcggcgaactaaatgccaatctggatatcagtattgccgacccagccaaatcttcatcatccacaaacaaagatatcaaatcgctcaattttgatgtgaagttaccgcttaatgtcgccacagaaaccgcaaaacagcttaatttatctgaaggaatggatgcggaaaaagcgcaaaagcaggctgataaacaaatcagcgggatgatgacattaggtcagatgtttcagttaatcacgattgacaacaataccgcctcgctgcagctgcgttatacaccgggtaaagttgtttttaacggacaggagatgagcgaagaagaatttatgtctcgtgccggacgttttgttcattaaaatactcactcgcctctgctcattcagaggcgagtaaaacttacttattctgacgctgtgatgacatgagagacgtcagaagccggtctttttcctgccacaatgagttcagccattgctgaaaatggcgcttaaagcttttgtcattgatgtagtcgccatgtaactcatcggcaataggctgtaaatccacatgtacgacaatccgcgtcagtttaccgcttaacatatcgaagaacggctgacggttattgtccggataacacagcgtaacattaagcagtttatcgaattgtttacccagtacatttagcgccatcgcaatgcctgccgcctttggtggcaacaagttttgaaaagtggagtgggtttgctgatgtttttcttgcgtgaaacgggagccttcaacgaaattgacaatggtggtgggatgcaggcgaaacttttcacaagaacgccgagtggtttcaacatctttaccacgtcgctccggatgacgtaataaataagcgcgggaataacgcttcataaacggcatatccagcgcccagcacgccaggccaagaaatggcacccaggccagctgttgcttgaggaaatatttattcatcggaatgtgcttacgaaacagcacgcacagtacgacaatatctgcccaactacggtggttacaaataagcagataccagttcttcttacttaacccttccagcccgtgaacttcccattgcaggtgtgggttcagatgcagtaataccgccagaccttcacaccagcaatacatcataaaatcacaaaaacgcgaaacctttcgccaaatgactggcacaggtagcaatagttttacaatcccggcaatgatgatcgggacggaacaaaaaatagtgaccaaaatggtcaatacgatactcagcaaaagggttatcgcagcgagtattctcgtcataatgaatttattcaaaaggttagccatagacagtgcgctaaagaagcgcaaggcgcagattttagcagaaaacgacccaaataacggatgatccttaaggagaaaaataattcatatctatccacattagaaaaaatcccattatctcaattatcagggatggctttacttttaactgcatgaaaaacaaagacaagcatcatgctgtaaaaagcatgataataaattaaaagcgatgtaaataatttatgcacaaagttatccacatgacgatttgcgagcgatccagaagatctacaaaagattttcacgaaaagcggtgaaaaactcatgtttttatcctgtctgtggcatcctttacccataatctgataaacaggcacggacattatggttcagatcccccaaaatccacttatccttgtagatggttcatcttatctttatcgcgcatatcacgcgtttcctccgctgactaacagcgcaggcgagccgaccggtgcgatgtatggtgtcctcaacatgctgcgcagtctgatcatgcaatataaaccgacgcatgcagcggtggtctttgacgccaagggaaaaacctttcgtgatgaactgtttgaacattacaaatcacatcgcccgccaatgccggacgatctgcgtgcacaaatcgaacccttgcacgcgatggttaaagcgatgggactgccgctgctggcggtttctggcgtagaagcggacgacgttatcggtactctggcgcgcgaagccgaaaaagccgggcgtccggtgctgatcagcactggcgataaagatatggcgcagctggtgacgccaaatattacgcttatcaataccatgacgaataccatcctcggaccggaagaggtggtgaataagtacggcgtgccgccagaactgatcatcgatttcctggcgctgatgggtgactcctctgataacattcctggcgtaccgggcgtcggtgaaaaaaccgcgcaggcattgctgcaaggtcttggcgggctggatacgctgtatgccgagccagaaaaaattgctgggttgagcttccgtggcgcgaaaacaatggcagcgaagctcgagcaaaacaaagaagttgcttatctctcataccagctggcgacgattaaaaccgacgttgaactggagctgacctgtgaacaactggaagtgcagcaaccggcagcggaagagttgttggggctgttcaaaaagtatgagttcaaacgctggactgctgatgtcgaagcgggcaaatggttacaggccaaaggggcaaaacccgccgcgaagccacaggaaaccagtgttgcagacgaagcaccagaagtgacggcaacggtgatttcttatgacaactacgtcaccatccttgatgaagaaacactgaaagcgtggattgcgaagctggaaaaagcgccggtatttgcatttgataccgaaaccgacagccttgataacatctctgctaacctggtcgggctttcttttgctatcgagccaggcgtagcggcatatattccggttgctcatgattatcttgatgcgcccgatcaaatctctcgcgagcgtgcactcgagttgctaaaaccgctgctggaagatgaaaaggcgctgaaggtcgggcaaaacctgaaatacgatcgcggtattctggcgaattacggcattgagctgcgtgggattgcgtttgataccatgctggagtcctacattctcaatagcgttgccgggcgtcacgatatggacagcctcgcggaacgttggttgaagcacaaaaccatcacttttgaagagattgcgggtaaaggcaaaaatcaactgacctttaaccagattgccctcgaagaggccggacgttacgccgccgaagatgcggatgtcaccttgcagttgcatctgaaaatgtggccagatctgcaaaaacacaaagggccgttgaacgtcttcgagaatatcgaaatgccgctggtgccggtgctttcacgcattgaacgtaacggtgtgaagatcgatccgaaagtgctgcacaatcattctgaagagcttaccttgcgtctggctgagctggaaaagaaagcgcatgaaattgcaggtgaggaatttaacctttcttccaccaagcagttacaaaccattctatttgaaaaacagggcattaaaccgctgaagaaaacgccgggtggcgcgccgtcaacgtcggaagaggtactggaagaactggcgctggactatccgttgccaaaagtgattctggagtatcgtggtctggcgaagctgaaatcgacctacaccgacaagctgccgctgatgatcaacccgaaaaccgggcgtgtgcatacctcttatcaccaggcagtaactgcaacgggacgtttatcgtcaaccgatcctaacctgcaaaacattccggtacgtaacgaagaaggtcgccgtatccgccaggcgtttattgcgccagaggattatgtgattgtctcagcggactactcgcagattgaactgcgcattatggcgcatctctcgcgtgacaaaggcttgctgaccgcattcgcggaaggaaaagatatccaccgggcaacggcggcagaagtgtttggtttgccactggaaaccgtcaccagcgagcaacgccgtagcgcgaaagcgatcaactttggtctgatttatggcatgagtgctttcggtctggcgcggcaattgaacattccacgtaaagaagcgcagaagtacatggacctttacttcgaacgctaccctggcgtgctggagtatatggaacgcacccgtgctcaggcgaaagagcagggctacgttgaaacgctggacggacgccgtctgtatctgccggatatcaaatccagcaatggtgctcgtcgtgcagcggctgaacgtgcagccattaacgcgccaatgcagggaaccgccgccgacattatcaaacgggcgatgattgccgttgatgcgtggttacaggctgagcaaccgcgtgtacgtatgatcatgcaggtacacgatgaactggtatttgaagttcatagagatgatgtcgatgccgttgcgaagcagattcatcaactgatggaaaactgtacccgtctggatgtgccgttgctggtggaagtggggagtggcgaaaactgggatcaggcgcactaagattcgcctgaacatgcccttttttcgtaagtaagcaacataagctgtcacgttttgtgatggctattagaaattcctatgcaacaactgaaaaaaaattacaaaaagtgctttctgaactgaacaaaaaagagtaaagttagtcgcgtagggtacagaggtaagatgttctatctttcagaccttttacttcacgtaatcggatttggctgaatattttagccgccccagtcagtaatgactggggcgttttttattgagcgaaagaaaaaatccgcaatgcctgatgcgccatgtttatcaggccaacggtagaattgtaatctattgaatttacgggccggatacgccacatccggcacaagcattaaggcaagaaaattattcgccgtcctgcgtttcttctacaggctgcatctcgctaaaccaggtatccagtttctgccgcagcttgtccacgccttgtttcttcaacgaagaaaacgtttcaacctgcacatcaccgttaaacgccagtacagcttcacgcaccatattcaattgcgctttacgtgcgccgcttgccagtttgtccgctttggtcagcaacaccagcacggcgatattgctgtctaccgcccactcaatcatctgctgatccaaatctttcagcggatggcgaatatccattagcaccaccagaccttgcaggctctgacgtttttcgaggtactcgccgagcgcgcgctgccatttgcgcttcatctcttccgggacttccgcataaccgtacccaggcaagtcaaccagacgcttgccgtcagccacttcaaacaggttgataagctgggtgcgtccaggggtttttgaggtacgagccaggcttttctggttagtcagcgtgttcagcgcgctggatttacctgcgttggaacggcctgcaaaagccacttcaattccggtatcggaaggtaggtggcgaatatcaggcgcactcatcacaaaatgcgtctgttgataattcaaattagtcaaagcggtcgtctccgtcagtcaaagctttgtggcgattatacctgaaccataataaaaggcggatttttcggcgtgagcgttgtaagtaaaagccatacgctttgtgagacattgccgatagtctttatgcgaaatagcagagaaaattctgcgatgcatgtcaaataagctatataaatcagtgaattgcttttatataaaactctgaaaatgtgcaaatactgatggcggttgattgtttgtttaaagcaaaggcgtaaagtaacacccatagagcgaggacgctaacaggaacaatgactcaggatgagggtcaggagcgccaggaggcgaagacagaggattgtcaggaagacaaacgtccggagacgtaattaaacggaaatggaatcaacacggattgttccggctaatggaaaaacagggtgtgttggcggcctgcaaggattgtaagacccgttaagggttatgagtcaggaaaaaaggcgacagagtaatctgtcgccttttttctttgcttgctttctgttagattccgccgcaaatctatactgaataaaacggctaaaagacgaaccattatgaaaccatcttcaccatcacgcagcaaaggtcatgcaaaagcgcgtcgcaaaacgcgcgaagagctgaatcaggaagctcgtgaccgcaagcgtcagaaaaaacgtcgtggtcatgcgccgggcagccgcgcagcgggcggtaacaccacgtcaggcagcaaaggccagaacgtaccaaaagatccacgtattggcagtaaaacccctattccattgggcgtgactgaaaaagtcaccaaacagcacaaaccgaagagtgagaaacctatgctttcaccgcaggcggagttggagttactggaaacggatgagcgtctggatgcgctgctggaacgtctggaagcaggcgaaaccctgagtgccgaagagcaatcctgggtggatgctaaactggatcgtattgatgagttgatgcagaaactcggcctctcttatgacgatgacgaagaagaggaagaagacgagaagcaagaagacatgatgcgtctgctgcggggcaactaacggattgccgccgtgggccttcccgttctgctgataacccttccggttatatgttatctggtgtggttattcgttaaactacagcggttgtcgcggcgacaaaagtggctgcgcaaccggctgatgacccgaaacgggcatccgccggtacgccgtagccgccagagacgccatcggaaggagtgagcatgtctgtacagcaaatcgactgggatctggccctgatccagaaatataactattccgggccacgatacacctcgtacccgaccgcgctggagttttcagaagacttcggcgaacaggcgtttttacaagccgtggcgcgctatcctgagcgtccattatctctctacgtacatatcccgttctgccataagctttgttacttctgcggttgcaataagattgttactcgccagcagcacaaggccgatcagtatctggacgcgctggagcaagaaatcgtccatcgtgcaccgctgttcgccgggcgtcacgtcagccaattgcactggggcggcggaacgccgacgtatctgaataaagcgcaaatcagccgcctgatgaagctgctgcgcgaaaacttccagttcaatgccgatgcggagatttcgatcgaagtcgatccgcgggaaatcgaactggatgtactcgatcatttacgcgccgaaggctttaatcgcctgagcatgggcgtgcaggacttcaacaaagaagtgcaacgtctggttaaccgcgagcaggatgaagagttcatctttgcactgcttaaccatgcgcgtgagattggttttacctccaccaacatcgacctgatttacggcctgccgaaacagacgccggagagtttcgcctttaccctgaaacgtgtggcggagctgaaccccgatcgtctgagtgtctttaactacgcgcatctgccgaccatttttgctgctcagcgcaaaatcaaagatgctgacctgccgagtccgcagcaaaaactcgatatcctgcaggaaaccatcgccttcctgacgcaatcgggctatcagtttatcggtatggatcactttgcccgtccggatgacgagctggcggtggcccagcgtgaaggcgtgctgcatcgtaacttccagggctacaccactcagggcgataccgatctgctggggatgggcgtttccgccatcagcatgattggcgactgctacgcgcagaaccagaaagagttgaagcagtactatcagcaagtggatgaacaaggcaatgcgctgtggcgtggtattgcgctaacgcgtgatgactgtattcgccgcgatgtgattaagtcgctcatctgcaacttccgtctggattacgcccctattgagaaacagtgggatttgcacttcgctgattactttgcggaagatctcaagctgctcgccccgttagcaaaagatgggctggtggatgtggatgagaagggaatacaggtgacggcgaaaggtcgcttgctgatccgcaacatttgcatgtgctttgatacctatctgcgccagaaagcgcggatgcagcagttctctcgggtgatttaaatagtgaatggcgcttcgtttacaaagtagaaaacgaaagcgccatcaatgtgctgagaacaagattgcctgatgcgctgggcaacaaaacctgttgaaattattgcttttgtaggccggataaggcgtttacgccgcatcaggcatctgagcatgatgcctgatgcggcgctggtcgcgtcttatcaggcctacgactttctccgcatccggcataaacaacgagcttcagctaaacagcccaatcatcgcggcacacagcacggcagcaacggcagtttgcggtgtgtggctgtcaactgcgccactcgataccagattaattattgattccagcataatgactctccccgttttccgggcaagatcatactgaacttatcggaacagtaaagcgcaaaataccagcaatttgcgctcaataatcaatctttacacacaagccgtgaatcactccatccccagctcttttaacttacgcgtcagagtgttgcggccccagccgagtagccgcgccgcttcctgtttatgcccctgcgtatgtcgcaacgcggtcgtcagtaacgtccgctccagctctggctgcgcttcggaaagcagattttgatgaccggaacgtagcgctctgtctgcccactgcgcaagaagcgtcgcccaactgtccggttgcatttgcgaagtactctccgcaaccgttgattcaaacagttcgccaggcaaatcctgaatcaacacttcctgtccggcagccattaccgttagccagcggcaggtgttttccagctggcgcacgttgcctggccacgccagacgcgtcaacgcggcttcggtttccggatgcagcaacttcgcttctacgcccagttctcgcgcggcaacctgtaaaaaatggcgcgccaggcggggaatatcttcccgacgctcacgcagcggcggcagatgaacgcggataacgttcaggcggtggaacagatcctcacggaacttaccttcctgcacccgctgttcgagattctggtgagtggcagcgataatccgcacatccactttcaccggcgcatagccgccaacgcggtaaaactggccgtctgccagcacgcgcagcaaacgcgtctgcacatccagcggcatatcgccaatttcatcgagaaataatgtaccgccatcagcctgttcaaaacgcccctgacgaatggtattcgcgccggtaaacgcgcctttctcgtgaccaaacagttctgattcgatcaaatccttcgggatagccgccatattcagagcgataaatggcgctttggctcgcggactgtggcgatgcagggcatgagcgaccagttctttaccggtgccggattcgccgttaatcagcacgctaatagaagaacgcgaaagccgaccgataatacggaacacgtcctgcatggctggcgcttcgccgatgatatcggtcgttgggccgttaagctgaacattacgcggctgctgctgttcctggtaatgactgatggcgcgctcaaccagcgccacggcttcgtcgatatcaaacggtttgggcagataatcaaacgccccttgttgataggcgctgacggcagcatccagatcggaatgtgcggtcataatgatgaccggaagcatcggatggcgctgtttaatctgcttgagcagcgccagcccgtccattcccggcatacggatatctgaaagcagcacatccggcgttttgctcgccagcgcctccagtacctccgcgccgttctcaaatgtcgtacaggttaaacccgctccagcgagcgcacgttcaagcacccaacggatggaactatcgtcatcgactacccagactatccctcgttgcataaacgtcacctttatttcctgataggcaggtaaaccgagaactcggtatgccctggccaactggtaaattcaattttgcctgaatgctgatcaatcaaattacgagcgatggataagccaagcccggtgccaccttcgcggccgctgaccatcgggtaaaacagcgtatcctgcaaatgaggcggaatgcctggcccgttatcttccacatcaatccgcgccgccagccggtagcgttcgccgtgtaaggtcagttgaaacgcggtgcgggtacgcagaatgatttcaccgccttccggccccagcgcctgtagcgcattgcgcacaatattcagcaagacctgttcaatttgatccgggtcgtgcgccagttctggcaggctggggtcgtaatcacgaatcaaccgcacgttgtccggcagttccatcgacaccagcgttaccacgcgttcagccactttgtgaatactttcggtaacgcgcgtaccgggcagctgcggccccaacagacggtcgaccagatttcgcagccggtccgcctgttcgataatcactttggtatattcgagtagtgatgggtcaggtaacgctttgctgagcagctgcgccgcgccacgtaaaccgccaagcggatttttaatctcatgtgccaggccgcgcactaaatcacgggcagcaacctgctgggcgtgctgtagctgttcctgacttaagcggcgctggttatccatcggagccatctccagcaggatcatgccgtccggcatacgctgggccgtcacagaaaggatatgcgagcgcccgtcgatgaccagcgtcacttcgttatcggtaaaaccttgccccgcctccagactttcttgcatcagctcgatatttaatgagaagtagctcaacagttccggtaacggtgtaccaaacaatttgcgggagctttgggcgagcagttgttgcgcggcggggttggcgtaatggatcgccaggttgtcatcgattaacaaaatactgttaatcagcgagttgaggatctgcccagcatcgggctgcgtgcctgttgccataaagcagtctcctgaacaggttgcaccattttagtgcattatagctttttacggataaaaagcgcgaagcatcagagaattgacggagaaaaaagcccatacagagatgggctacagatagctgacaaacttcacgttggagagcgactcacctgctccggcctaccacatcatcaccgtgtaggccggataagacgcatttgcgtcgcatccggcgtgatgtgcttgccaccgatcccaggcctgccagagacaggcgaaaagtttccacggcaactaaaacacttagacgctgtagtacagctcaaactctaccggatgcggagtcatacgcacgcggtcatcttcttcgcgacgcagtgcgatgtacgcatcaattgcttcgtcagtgaacacgccaccggctttcaggaactcgcggtccagatccagttcgttcagtgcttcttccagagagcctgcaacctgtgggatctctttcgcttcttctggcggcaggtcatacaggtttttgtccatggcttcgcccggatggatcttgttcttgataccatcaagaccggccatcagcagggcagcaaagcacaggtacgggttagctgccggatccgggaaacgtacttcgatacgacgtgctttcggagaagaaaccaccggaatacggatagacgcagaacggttacgcgcagagtaagccagcattaccggtgcttcatagcccgggaccagacgcttataagagttggtggtcgggtttgccagggcgttaatcgctttagcgtgtttgattacgccgccaatgtagtacagcgcctgctcagacagacctgcgtatttgtcgcctgcgaacaggttaacgccgtttttagacagagacatgtggcagtgcataccggagccgttatcaccgaacatcggttttggcataaaggtcgcggttttaccgaagcggtgcgctacgttgtgcacaacatatttgtagatctgaatttcgtcagcttttttggtcatggtattgaagcgggtagccacttcgttctgaccagcagtcgctacttcgtggtgatgggcttcaaccaccaggcccatctgttccatcaccagacacatttcagaacgaatatcctgagcagagtctaccggcggaaccgggaagtaaccgcctttcactgccggacggtgacctttgttaccaccttcatattgggtggaggagttccatgcgccttcgatatcgtcgatagcaacgtgagaaccggagatagatgatccgaaacggatgtcatcgaacaggaagaattcaggttctggcccgaacagtacggtgtcggcaatgccagtggaacgcaggtaatcttcggcgcgcttcgcaatggagcgcgggtcacggtcatagccttgcagggtgccaggttcaaggatgtcgcaacggataatcagggtggagtcggcgaagaacgggtcaatcactgcggtggatgcgtctggcatcagcaccatgtcggactcgttaatgcctttccagccgccaatcgaggagccgtcaaacattttgccttcttcgaagaattcagcattcacctgatgagcagggatagtgacgtgctgttctttacctttagtatcggtgaagcgcaaatcaacaaacttcacttcgtgctcgttcagcatcgtcagtacgtgttcagcggacatactttaactctcctggattggtcatggtcgtcgtggtaacgaaatctgcaattattttggccgtgtcgccgtaaaaaagataaagcgaaatctgtgccaacttttaaattgcccctaaaaggcgttatcatgcgcaccatcgtgcaaaagggctgcaccacgatgtgaatgttgcaccaatatagtgcttcaatggaaacattaagcaccatgttggtgcaatgacctttggataaccctttttatgctccgtgaaagcgatcacaaagggactctgcaatacttgtttgcggaggatgtttgtgatcctgttttgtagtgcgattaatccgtgtacaataacgcgctatttctaatgcctgaggcaaagttgtgatcgaaaaattgcgtaatatcgccatcatcgcgcacgtagaccatggtaaaactaccctggtagacaagctgctccaacaatccggtacgttcgactctcgtgccgaaacccaagagcgcgtgatggactccaacgatttggagaaagagcgtgggattaccatcctcgcgaaaaacaccgctatcaaatggaatgattaccgtatcaacatcgttgataccccggggcacgccgacttcggtggtgaagttgaacgtgtaatgtccatggtagactcagtgctgctggtggttgacgcatttgacggcccgatgccgcaaacgcgcttcgtaaccaaaaaagcgtttgcttacggcctgaagccgattgttgttatcaacaaagttgaccgccctggcgcgcgtcctgattgggttgtggatcaggtattcgatctgttcgttaacctcgacgcgaccgacgagcagctggacttcccgatcgtttacgcttctgcgctgaacggtatcgcgggtctggaccacgaagatatggcggaagacatgaccccgctgtaccaggcgattgttgaccacgttcctgcgccggacgttgaccttgacggtccgttccagatgcagatttctcagctcgattacaacagctatgttggcgttatcggcattggccgcatcaagcgcggtaaagtgaagccgaaccagcaggtcactatcatcgatagcgaaggcaaaacccgcaacgcgaaagtcggtaaagtgctgggccacctcggtctggaacgtatcgaaaccgacctggcggaagctggcgatatcgtggcgatcacgggcctgggcgaactgaacatttctgacaccgtttgcgacacgcaaaacgttgaagcgctgccggcactctccgttgatgagccgaccgtttctatgttcttctgcgttaacacctcgccgttctgcggtaaagaaggtaagttcgtaacgtctcgtcagatcctggatcgtctgaacaaagaactggtacacaacgttgcgctgcgcgtagaagaaaccgaagacgccgatgcgttccgcgtttctggtcgtggcgaactgcacctgtctgttctgatcgaaaacatgcgtcgtgaaggtttcgaactggcggtatcccgtccgaaagtaatcttccgtgaaatcgacggtcgtaaacaagagccgtatgaaaacgtgacgctggacgttgaagaacagcatcagggttctgtgatgcaggcgctgggcgaacgtaaaggcgacctgaaaaacatgaatccagacggtaaaggccgcgtacgtctcgactacgtgatcccaagccgtggtctgattggcttccgttctgagttcatgaccatgacttccggtactggtctgctgtactccaccttcagccactacgacgacgtacgtccgggtgaagtgggccagcgtcagaacggcgtactgatctctaacggtcagggtaaagcggtcgcgttcgcgctgttcggtctgcaggatcgcggtaagctgttcctcggtcacggtgcagaagtttacgaaggtcagattatcggtattcatagccgctctaacgacctgacggtaaactgcctgaccggtaagaaactgaccaacatgcgtgcttccggtactgacgaagccgttgttctggttccgcctatccgcatgactctggaacaagctctggagttcatcgatgatgacgaactggtagaagtgactccaacctctatccgtattcgtaaacgtcacctgacggaaaacgatcgtcgtcgcgctaaccgcgcaccgaaagacgattaatttcgttttttagttataaaaaacctgccatcgctggcaggtttttttttacctgtcgtgagcgcacaccaatgcgagtatctcccttataagtctgtgattacgtcaatagagagctttgtcacaattatctgcaaagtcatacaccgttaattgctttcttttttggcgtaagcgtaagatgcttcatctggtttaaaccaaaaggattaaacaatggcggagaatcaatccaccgtagaaaatgcaaaagagaaactggatcggtggttgaaagatggcatcaccacgccgggtggaaaactcccttcagaaagagagctgggagaactgctgggcattaaacgtatgacgctgcgccaggcgttgttgaacctcgaggcagaatccaaaatcttccgtaaggatcgtaaggggtggttcgtgacccagccgcgatttaattacagtccggagctgtcagcgagctttcagcgggccgcaattgagcaaggacgagagccttcctgggggtttaccgagaaaaaccgtaccagcgatattcccgagacgctcgcgccactgattgcagtgacaccatcaactgaactctatcgcatcaccggctggggggcgctggaaggacataaagttttctatcacgaaacatatattaatcctgaagttgctccgggttttattgaacaacttgaaaaccactcattttctgcagtctgggaaaagtgctaccaaaaagagacggtagtaaaaaaattgattttcaaacccgtcagaatgccgggcgatatcagcaagtatcttggcggttctgcgggtatgccagcgatcttaattgaaaagcatcgcgccgaccagcaaggcaatattgtccagatagatattgaatattggcgatttgaggccgtagacctcatcattaatctgtaggtgttttatgatgacaataaataacgcaagaaagattctacaacgtgtcgacactcttcctctttatttacatgcttatgcctttcatttaaatatgcggctggaaagagtgttgcctgctgatttacttgatatcgcaagtgaaaataatctacgtggcgtcaaaatccatgttctggatggcgagcgtttttctcttggtaatatggacgataaagaactctctgcctttggagataaagcccgccgtctgaaccttgatattcatattgaaaccagcgcctcagataaggcatctattgacgaagccgtcgccatcgcgttgaaaactggggcatcgtccgtacgtttttatccacgttatgaaggtaatttgcgcgacgtattatcgattatcgctaacgacattgcctatgtacgggaaacgtatcaggactgcggcctgacttttacgattgagcagcatgaagatttaaaaagtcatgagctggtgtcgctggtcaaagaaagtgagatggagtctctttccttactgtttgattttgcgaacatgatcaatgcaaatgagcatcccatcgacgccttaaaaacgatggcaccgcatattacccaggtccatattaaagatgccttgatcgttaaagaacagggtggcctgggtcataaagcctgtatttcaggtcagggtgatatgccgttcaaagcgttattaacgcaccttatctgccttggtgatgatgagccgcaggtgacggcatatggcctggaagaagaggttgattactatgcgccggcgttccgctttgaagacgaagatgataatccgtggatcccttatcgccagatgagtgaaacacccctaccagaaaatcatttactggatgcgcggttacgtaaagaaaaagaagatgcaattaatcagataaatcatgtgcgtaacgtactacaacaaatcaaacaagaggcaaaccatcttctgaaccactaataagttttaactcatacgcagttaataaaaccattctatatgaatggtcggtatcttattgcctttaaaacagtgattttaaaaatcgcttaggggatgttatgctcacgaaaaagaaatgggcgttatttagtctattaacactgtgtggcggtacaatttataaattaccgtcgctgaaagatgcgttttatatcccgatgcaggaatatttccatttgaccaatggtcaaattggtaatgccatgtcggtaaactcatttgttaccacagtgggcttttttctgtctatttattttgccgataaactaccgcgcagatacaccatgtcattctcactcattgcgacaggattactgggtgtttatttgacgacaatgccggggtattggggcatcctctttgtctgggcgctatttggcgttacttgcgacatgatgaactggccggtcttgctcaagtcggtaagtcgattgggcaatagcgaacaacaaggtcggttgtttggcttcttcgaaacagggcgtggcattgtcgataccgtggtggcattttctgcgttggcagtatttacctggtttggcagtggcttattaggttttaaagcaggcatctggttctattcccttattgtgattgccgtaggcattattattttctttgtcctgaatgacaaagaagaggcaccgtccgttgaggtgaaaaaagaagatggggcatcgcaacacaccagtatgacctcggtgctgaaagacaaaactatctggcttatcgctttcaacgtcttcttcgtttacgcggtttactgtggcctgacattcttcattccattcctgaaaaacatctatctattgcccgttgcgctggtgggggcttacggcatcattaaccaatactgtctgaaaatgattggtggaccgattggtggcatgatttcagataagatcctgaaatcgccgagtaaatatctatgctacacctttatcatcagtaccgctgcgctcgtactgttgattatgctgccgcacgaaagtatgccggtctatttagggatggcatgtacgctgggctttggcgcgatagtctttacacagcgagccgtattttttgcacctatcggcgaagcaaaaattgctgaaaataaaacaggcgcggcgatggcgttgggtagctttattggttacgccccggcgatgttctgcttcagtctgtatggctacattctggatttaaatccggggattattggctacaaaatcgtgtttggcattatggcctgcttcgcattctgtggtgcggtggtttccgtaatgctggttaagcgtattagccaacgtaagaaagagatgctggcggctgaagcttaattaatggccggatgtgcttaatccggccaacgaaaaccgtatcaaccgtaggccggataaggcgtttacgccgcatccggcagtttcacatcagaagaaatacttcgtcccgatacgaatctggttttgctcgcggtggtacggttcgacattacgatctaaccagcgtaattcgaaataaggcagccagtgttcattaatgcgataacggaaggtgttagtgatttcccagtgatgatcttttccattgctgctattaaagtcatttacgcgtataaaataatgtggctcaaatgtataggagaacttatcggtgattttaaaattccagtaggtaccaatttcataggtgtcattattatccagttccccgctcaaatctgttgaactatagttattatggttatagcgatttcgtactgtcagattaaaccatggtacaaatttatagttgacgtccagatacactgcaccacccgaaccgatactcttatcattaattaagccaccgggctggatggttaatttatcggttggtttaaataacggataccaaccttcgatttcgttatatccatgttttagttcatcttctcgctgaaaggtgtaggtattggttaacataatacccgcgcccatatcgaagttataacccacacgtagcataacctcgccctgatcggaggcgagattatatgcctccctgttttcgacgtatgcgccagcgaatactgaggcagaggtcagagaagataataaaattattgcattaatatttttcataataagtccatttttaaacgtagggaggccgccacccaccaggatggaaatagcggctattgacatttataacgttacggaagccgttttttcttctgtctcaatttctttatttttgcgttggttgatttcctcaataatcaacgcaaaccgtttttcattgagtgtgtaaaagaatcccatcgtcaatgcagcaataattgccagtgcacaaggccagataaaaatgagctgacgcaaaccctgtaatgtcgcatcactttgcgcgatgttgggaacataaccgatttgcgtcagcataatgcctggcaagaagccagcaagtgcggcagaaattttacgaaagaaggtataaccggtataaacagaaccttcggcacgaataccggttttccattcaccgtaatctacggtatctggtaccagcgcccagttcaggctgtttacaaaggccgtgccaaaaaaggcgacacaagagaacatgacgaaagtgaaagagttacttccccagaaataattcaggatatcaccaaccgcccatagcaccatgccagctaaataaacctgttttttaccaaaacattttacagttaatggcaccagtaatacgccgacgaggatgcatcccatactgaagaatcccatccacgacaataaattaatatcattcagcacatactgggtgtaatagacctgaatcgccagtttgatattaaatgccgccagggtacacaagttagcaatgcataaaaccagcaatggcggattccgaaatatcgcgcaaaaagatttgagaatactggctttatgtccggttggtgctgtgtccacataatgctctttgacgcctctgtagcacagcatcataaaaataaagccgccaatggagaacataagtgccgcacaggcataaccgacggttgagtcagaaaaaagcgactgcaacggaataaacgccacggtacaaatcaatagccctatggttgcaccaccctggcggtaagccgcgagctgcgcgcgctcattcgggtttttggtaattgccgggatcatcgcgccatacgagcagttcatcagactgtatgaaagcccaaacatcataaacagcgccgtggcaatcgtcgttttaaccggcaaactaaaagtggtggcgataaactggagcgttgcaattaacgccgccggaaccgctgcatataaaataaagggacgaaatttgcctttaggcccaatatttttccgcgagtcgagtaaaaatccggtgagcatatcggtaaacgcggtaaaaaacttcgccaccagaaagataatcccgccatagtaagctggcatccctaattcatcggtataaaatttgaggagatacagagtaccgatgctaagcattaaattcgaaccaacgtcgcccataccataggcgattttttcccacagattcagttttaatgtcagtggattatggtcagacataatcactccttataacgccccgcagggcgtcgtttattattacgccgtgcgtttacgggcttctatttcttcaacaatgcggacatacatcttctcgttcaggctgtagaagcagcccatcgctacaatggtgactaccgccagtgcgcttgggtagatgaagatcagctggcgcaacccttcaatggtgtggtcagcctgtgcgacgttcggcacatagccaatttgcgtcagcatccagccggggaagaaacctgccagcgcctgagaaactttgcgaaagaaggtgaagccggtgtagaccgtcccttcagaacggacaccggtgcgccactcgccgtactcgacggtgtcagaaaccagcgcccagttcaggctgttaacaaacgccgaaccaaagaacgccaggcaggagaaagccacaaagttgaccgagccgccgccgaagaaatagttgagcagatcgcccagcacccagatcagcagaccgccaatatagaccttcttcttaccaaaacgcctgactgcaccaggcatcaggaacacgccgatgaaaatacagcccatgctgaaaaatcccatatatgacaacaggatgggatcgttaagcacgtactgggtgtaatagacctgaatggcgagcttgacgttaaacgcccctaaggtacagaggttggcaatgcacaaaatgaacagtgggcggttaccggcaattgcgcggaaagattgcaacaggcctggcttttgcgccggattggtaggttgggtttcgacataacgctctttcacgcccgaatagcagatccacataaacagcaggccaaacagtgaaaacagcgtggcggcgaagatatagccaagttgctgattaccctcgataagattcataaccggcacgaatcccaccgtgcacagcagcaggcccagcgtagcgccgccctgacgccatgctgccagcgaggcgcgttcgttggggtttttggtaatggcgggaaccattgcgccgtaggagcagttcatcatgctgaaaaacagtccgtaaagcataaacagaatagtggccatcaccgttttaccggtgacatcgaacggtgtgccgataaagttagcgattgccaataaggtaaccgggaatgacgcatacagaataaaaggacggaatttaccttttggaccgatcttgcgtcgggaatccaacatgatgccggttcccatatcggtaaaggcggtaaagaatttcgagatcaaaaagataatgccgccataggtgccaggcagccccagaacgtcggtataaaacttcaaaagataaagcgtaccaatatccagcaggatgttagaggccagatcgccgataccgtaagagagtttctctttaaagggcaggcgcaaagttgccggatcttccgttgtgatgtgactcatcgttattctccatttgcccgtgagtttccccacgggcgggcatgattagatgttttttaacgaggcgaacagtgcagcccattcgctgtcggcgcgataaaagaccggcggcttgccgatgggcgcttcaacagttatttctccaccgtggaaggtttctccggtccaggcgtggacccagttatcctctggcagatagagcgtccagtcgctgcgaccttcttcgtgtaccggagcaaccagaatgtcgcgacctaacaggtactgatatttcagggaataggtctgcgcgtcgtcttcgtaatgcaggaacagcgggcgcataaccggcaggccggacttcgcattcagcgcgacggcctctttcaggtaaggtttcagggtggtgaagacggtggtcatacgggcgaaatgggcgatggtttccgcgtcgccgtcaaactgccagttgtcgccaggacggttaccttcgtgggtgcgcatcatcggcgtgaaggcgctgaaatcgcaccagcgcagcagcagctctttgctgcgcttcatctcaaacagggtggtataaccgccaatgtcgctgtgatgcaggccatgtccggtcattgccagagatagcgccgccgggacaaccgacgccaggccatcgtccagactccagtccacgttctggtcacccgcccacatcatggtggagtatttctggctaccggtagaaccggcgcgcataaagaagaggatctcgccgagcttgcccgtttcttcaagggcttcgtagttacatttcgcccacagcgcgggccaggcgttatgcataatttccgcgctgatgccgttatgcaggtacgtgtcggtgggcagatactcgccgaagtcagccatccagccgccgcagccgagttcaatcatgttctttttgataacttccttgaaccaggcgtaggcttccggattggtgagatcgacaacgccgccgtagaactcgccaaactccaccagatagtcgccaccggcgacatcttttgccagataaccgcgctttgccgcctcttcgcagagatctttatcactggcaacatacgggttgatataggcaaggaactgcacgccctctttgttccactgcttgatacgcgaatccagttgcgggtagttttcgctgttccacttccagttccacatcacgcgtttgccaaaagaggtcatacgaataccggaccagtcctgcgcccagatgccgttgaccttcacgcccgcgttacgcatggtgtccagtttcttctggcacacttccgtcccgccctgaatgccgagcgttactccgtcataaatccagtcgggcagttctggctggcgtcccagcagggcggttaatttttccagcagggagatgtatgtgtcagcacattcaaaacgcagcgttgctttgtcttcccacagcgccagttcatggtattccggggcactaaagtcgaagttcatatagcaactgttatcaacatggcagtaatacttctgcgtgctgacaaacgtaggctgtgggaagaaagtccagtaatagtcgccgcccgcattttctttgcagtcggcctgccaggtgacataggtttgtttattgcgaccaacgccttgttcactggtccatagcgggaacggtttgccacgcagatcgaagtaggaaaactgttcgccgcagccgtagatatggtcctctggttgagcggcaaggcgcagccagatacggttgtggttaaggttgtcgttttgtagttccagcaataaacggccctgatcgtcggcagagatattcagcgtggcgctaatgtcagaaccacggctgaaatggattaaccaaccatccggcgactggctgacgatggcgtcggtaagcgcaattttctcctgtagtttatctttaatgctgaaattgccgcggaacatatcgatatccgcaatacctgaaccaatccataaacaaggattatctttgctatgggttaaaataagacgctgttgaaaatgtagggtaaaactgtcgttattctgatgaaactgaaaatctggtaattgtgggcgtggcgtatccataaataatctccatagagtataaagctaatatttcatgccatcctgttgttacaggtttcattaattaaagaatgtggtgctggtataaattaaaacccgcataagtgattatttactttcttcagcccggcggattgccgccacttttttaccaaatgccagttgcagtataactaacaaggtaaaaggaggcagaagcgcggcagcagcgggaattcccagcgcgccttttatcaacatagaaccggaggcaatcagcaacaaaaagaccatcacacggaacactttgactgaaatgcgtttatgcacatattgtccaaccagtgaaccgaggatcatggtgggaatacaaaacagcaccagtttaaagatagaaacagtcaaaattccgctggtcgccagcccgccgatcaccgcgatgttgtttgcggtgaagaaagcgttcagagtgccacgaaatgccgccgggcctaagttacgcagcataccgtagataaccatcggcggtccgttggttgaaaacgctgcccctaacgctcctgccacagcgccgataggtgcggcgatccagttgcggtcataaatcggcaggcgtggaataaacatactgtaaaaggagtacaggataaggaatccgcctaagcccactttcataaaatggtcgggtaaatatgacagcgcatataaaccgacgggtattcccagaaacgagaaaataatcagtaccattgccgatcgccaatccgtttctttacgtgacagccaggtggcgtacaaggcggtcgcggtgccgacaatcaccgagagcggagttgccatttttacggggagcattaacgtgacgagcggcatggtggttaaaccaccgccaaatcccgcgcatatccccacaaaggtataaagaaacattaacgcgataacgatacataccacgtttgtttccagcatgaccccatccggtgaaaataacgtaaaaaagtccatgatatttcctgttgtgtaaatacaaccctaaacaatgatctcgttcttttcttaataaaattaattgtgctgcccgtaaatattaaaaaacaggcggtgcgttttccctggttccagtaataataagtcgagacctgaattaaaggcgttaggtgggcaactcataggttcaactgccagtccctgacgctgtaatttttcgccgctataaatctgcacccagggttgatcggaacaaaggcttaccgaaagcgcctgttgtggatgggtaatggttatttcccacagatcattagcggttttaaaggtgtggtcgatttttgtcgcggctatttttttcgcctgcgtgaaatttaaatccagctcatcaacgtggtgaagcgttgtcggattagcgtgctcatcgacggcataaacctggtttgccggaagctggaacagatattcatcaacagatgttaagttgcaggttaaataaggatgaatacccacaccatagggtgcggtcacagtaccaatattctgacttgcgatctcaacggaaagacccgtgcgtgcattgagcgaataaacaacctgcgaagccagcataaacggatagccgtaactgggtggcagaaaagctgtcagggtaacgctggtggcggttaattcgctgatttgccagtcacgccaggcgagcagcccatgaatagcggcttttgaaccatgttcattaatgggtaactgatattcctgcccctgatagcgataacagccgttggcgatccggttcggccacggaataaggactttgcccagatgtgccagcggcatctcttcgggtttatgtggaataactaaatgacagccctgaaaggttaattcagccagacctgcaccgacggtcacaatggtcgcgtgataatcccccgcggcaagtgaaacggtctgtccactgcaatgcatgttggtgatttgcatacgaggtacctttattgaataacgacatacccggcgtgcagcctgatatgtcgtttttttttagtcagctatttcgcgttaatatccagcagacccgccgcaactgccggagccaggcctggcgctaacgggatacgcgggatcaccaggcaatgcagcaggtgataaatatcctgtttaccgtcccagactttcgtggtgactttattgtccgcatccagctcctgccaccaggaaccattttcatagtccatcaggtacttaatgcagtagtcccaccatgtctgataccaggtttcatactggcgatcgccggtgacggtgtagagcgcgtaggccgtacccatcgcttcgacgataggccaacgcacacgttcgcggaccaccggttttccttcccagtcaacggtataaacaatcccgtccgcaccatcgggtgcccaggcatcacgcacggtggcgttaaacagacctttggcatcttctagcagccatgctggcggttgttcgcaacgggcttccagggccgcgtggatgtgcagcattaaacggccccattcgatccagtggcctggtgtacctccgaacgcgcggaagcggtgcgccgggttatctttgttgtaatccggcagcggattccactgggtatcgaagtgttcgttaacgcgataatgattatttcttgcgacgtcgtggataatcacggaagccacgcgaatcgcgcgatccagccattttttgtcatgcgttacgtcataaacaattaagaaagcttccactgcgtgcatattggcattgccgccgcggtactcttcggttttgctgaaggcttcgtcccaggactccaggcacatctgctcttcttcgctccagaagtatttctcgataatttcaatggtgtaatcgagcagcttgcgcgcttccggatgaccggtagtgacggcgctggcagcacccagcagagcaaagaaatgttgatagccctgtttggaggcatccaccacgccctcgtcattcacacaggcataccagccgccatattttttatcgcgcagtgcgccgttcatggctttaataccgtgatcaaccaacgagtaagcgccaggtcgacccatcgccgcagcaacggaataaacgtgcaacatccgagctgtgatccacagatgggtgcccatctcttctttgatttgccctttattgcctaaccagccaaatccagtcggtactacggaatttttaccaaaatcaaagatgcgatcggtttcctgttccagccaacggttgtgacttaaagtgttaaaccatttcatttttgtatccccatcttaacggcgtttagccatcatttcgtcgacgatatcgcccagttgttgtaatttcggtgcacaaacgtcacgcagcatcagctcgttgtctggtaaaccgacgaccgatgcccagacggcacgaccagccaggaagcccgatgcacccgctgtcattgccacgcgtacggcacgcgggaacagtttttcgtcgacaccggaagagaggatcacccacggcatattgatatggtcattcagacgttgtgaagcactgagaagctcttgttgcggacctttaccgtaaagcggcatttcaactttgtagaggtcagcgccactgtcgcccagctctttggcagcatcgatgatcgcttgttcgcgatcgaatttatcgccacgacgtggtgggcggacgactggctcaataatgcttaccaggccgtgtgagtggcacagttcgttaaactctttcaccatatccaggcgttgctgcgcatcttcatcactacgccacagcaccagcagttttaaggctttgccaccgtcttgtttgatctgtagcggattgattttgcggtcaatgaccacgctatctaccggaataccgttgccaggaatgaactcatcggcggcgacaatcatggcgcaacttttggcaatcgcgttttgctcaaccacctggcggtaacagaattgttgatctaccagaatcgccgaggcataaggcgagagggtcttcgccgcgttaactttgaaatcagttaaaacgctatcggctaccggagcgggtgccccagccgcggcaaacatcatgcgcatggcttcgcgctgatcgaccgccagcatggcaaaaccgcccgatgcgcgcgtaatgtcgttgatggtgtacttattcattcatttattcctttatccagtcgttacatttttactttggcagtcatcccggcactgacacggacctgttccagaatggcggaccagtcctggcgaccgcgacccgctgcgcgcgcctggctataaacctcccgtgaggcggcccccagcggcattggcacatgcagctggttggcgacatcaagggcgatgccaagatccttatgggcaagatcgatcatgaaggcgggagaaagatctccgctgaggactttgtttggccaggaagtggtgaagtggcctttaccggcggcggtaccgctcatcactttgacggcaacatcgaagggaagattcagggcttcgcacaaaacggcagcttctgccgaaagcgcattgagcgcgatgctcatatagttgttgatgagcttaacgcggatccccatgcccggaccgccagcgttaatcaactcactgcccatcgccatcaggatcggcgtggcacgttcaacttgttcagcggtgccgccagccagcagtaacagagtaccggtaatggcatttgcagaagtacggcctaccggaacatccatcatgctgaagcctttggcttgcatatcggcaatcaatttatcggtttgcagcggatggatggtcgacatatcaatgaccagcgcatcggtagataagctttcgcaaacgccgttttcaccgaacaacacgctgcgcaccagatcgccattcggcaacatggtaatgataaattcggcatctttagcggcctgcgccgggttggcggcgggagtcgcgcctttgtctaccagatgccgcacagcctcggcattcacatcaaagacgcgaagttggtgcccttgctgcaataaattgctcgccattggcgaacccatttgtcctaaaccgataaacgcgattgctgccataaccttctcctgaatacagcgatgtcactttttgtcatttatgacacgctttgattgtctgtttttgatcgtatttgtaatttatagtcaaaaaattgacagccgtcactttttaaacaattggtgaaattaaaatgaacgcatcccaaaatgtttaaggaatgaccatgattcgtgttgcttgtgtaggtataaccgtgatggatcgcatctattacgtggaagggttaccgacggagagcggtaaatacgtggcgagaaattatacggaagttggtggcgggccagcggcgacggcagcggttgcggcggcaaggctgggggcgcaggttgattttattggtcgcgtaggtgatgacgacacgggcaacagcctgctggcagagctggaatcctggggcgttaacacccgttacaccaaacggtataaccaggcgaaatcatcgcaatccgccatcatggtggatgccacaggcgagcggataatcattaactaccccagcccggacctgctgcctgacgcagagtggttggaggaaattgatttctctcagtgggatgttgtgctggcagatgtacgctggcacgacggcgctaaaaaagccttcactctggcccggcaggcgggcgtgatgaccgttctggacggtgatattacgccgcaggatatcagcgagctggtggcattaagcgatcatgcggccttttcagaaccgggtctggcgcgcttaacgggcgtgaaagagatggccagtgcgctaaaacaggcacaaacgctcacaaatggtcatgtctatgtgacccagggcagcgcaggctgtgactggctggaaaatggcgggcgtcaacatcaaccggccttcaaagttgatgtggtagataccacaggtgcgggtgatgtttttcacggcgcattggcggtggcgctggcaacaggtggggatttagcggagtcagtccgcttcgccagcggtgtagcggcgttgaaatgcacgcgtcccggtggacgagccgggatccctgactgtgatcaaacccgatcttttttgtcactttttgtataaaatgccagggtgatggtttttcgaggaattttcatgagccttaccgaactaaccggtaacccgcggcacgaccaactcctcatgctgatcgccgagcgtgggtatatgaatattgatgagctggcaaatctgctggatgtctccacgcagacggtgcgccgggatattcgtaaattaagcgagcaaggcctgattacgcgccatcacggtggcgcgggtcgggcttccagcgtcgttaatacggcgttcgagcagcgtgaggtttcgcaaaccgaggaaaaaaaagcgattgccgaagcagtggcagactatattcctgatggttcaacaatatttatcaccattggtacgaccgttgagcatgtcgcccgggcgttacttaaccataatcatttgcggataatcaccaacagcctgcgtgtggcgcatattctttaccacaacccgcgctttgaagtgatggtgcccggcggtacgttgcgctctcataatagcgggatcattggcccttcagcggcgtcctttgtggccgattttcgtgctgattatctggtaacaagcgtaggcgcaatcgagagcgatggcgcgttgatggagtttgatgttaacgaagctaacgtggtgaaaacgatgatggcgcacgcgagaaatatcctgctggtcgccgatcacactaagtatcatgcttcggcggcggttgaaattggtaacgtggcacaggtcaccgcgctctttaccgacgagctgccgcccgctgcgctaaaatcacgcttacaagacagccaaattgaaatcattcttccccaggaagacgcgtagatttttgtgaccgttgacctggcttcataccttgccacatagccaaacccatcctttcccgctacagttaatttcttgtggcgcgaaaggaggcaaaaatgctctatatctttgatttaggtaatgtgattgtcgatatcgactttaaccgtgtgctgggagcctggagcgatttaacgcgtattccgctggctacgcttaagaagagttttcatatgggggaggcgtttcatcagcatgagcgtggggaaattagcgacgaagcgttcgcagaggcgctgtgtcatgagatggctctaccgctaagctacgagcagttctctcacggctggcaggcggtgtttgttgcgctgcgcccggaagtgatcgccatcatgcataaactgcgtgagcaggggcatcgcgtggtggtgctttccaataccaaccgcctgcataccaccttctggccggaagaatacccggaaattcgtgatgctgctgaccatatctatctgtcgcaagatctggggatgcgcaaacctgaagcacgaatttaccagcatgttttgcaggcggaaggtttttcacccagcgatacggtctttttcgacgataacgccgataatatagaaggagctaatcagctgggcattaccagtattctggtgaaagataaaaccaccatcccggactatttcgcgaaggtgttatgctaaaaaccattcaggacaaagccaggcaccgtacccgtccactatgggcctggctaaaactactctggcaacgcattgatgaggacaacatgacaaccctggcaggtaaccttgcctatgtgtcgttgctctcattagtgccgctggttgccgttgtttttgcgcttttcgccgcttttcccatgttttccgacgtcagcattcagttacgtcactttatttttgccaactttctgcctgctactggcgatgttattcagcggtatatcgaacaatttgttgccaattccaacaagatgaccgccgttggggcgtgcgggctgatcgtcaccgcgttattgctgatgtactccatcgatagcgcgttgaataccatctggcgcagtaaacgagcgcgaccaaaaatttactcgttcgccgtgtactggatgattttaacgctggggccgctgctggcaggggccagtctggcgatcagttcctatttgctctccctgcgctgggcgagcgatctcaatactgtcatcgataacgtgctgcgtatttttccgctgctgttgtcgtggatctccttctggttgctgtacagcattgttcctaccatccgcgtacctaaccgcgacgcgattgtcggcgcgtttgtcgccgcgctcctgttcgaagcaggaaagaaaggtttcgcgctttatatcaccatgtttccgtcatatcagctcatttacggcgtgttggcggtgatccccattctctttgtttgggtctactggacatggtgtatcgtcttgcttggcgcggaaattactgtcactctcggggaataccgcaaactaaaacaagcagctgaacaagaagaagacgacgaaccatgattgcattaattcaacgcgtaacccgtgccagcgtcaccgtggagggagaagtgacgggcgaaattggcgcgggacttttggtgttattgggtgtcgaaaaggatgacgacgaacagaaagcaaaccgtctgtgcgagcgtgtgctcggctaccgcatctttagcgatgccgaaggcaagatgaacctcaacgtgcaacaggcgggcggcagtgtgctggtggtttcccagtttaccctcgccgcagataccgaacgggggatgcgcccaagtttctccaaaggtgcatcaccggatcgcgcagaggcgttatatgactatttcgtcgaacgctgccgtcagcaagagatgaacacgcaaacaggacgcttcgctgcggatatgcaggtatcgctggtcaatgatggccccgtgacattctggttgcaggtatgagccagcttccagggttgtcacgggaaacaagagagagtatcgctatgtatcaccttcgggttccacaaacagaagaagaattagagcgttactatcagtttcgctgggaaatgttgcgtaagcccctgcatcaaccaaaaggttcggaacgcgacgcgtgggatgcgatggcgcatcaccagatggtcgtcgacgagcagggtaatctggtggcggtaggccgactgtatattaatgccgacaatgaagcgtccattcgctttatggccgttcacccggacgtgcaggacaaagggttaggaacgctgatggcgatgaccctggagtcggtggcgcgtcaggaaggcgttaagcgcgtgacctgtagcgcccgtgaagacgcggtggagtttttcgccaagctggggtttgttaatcagggagaaatcaccacgccaaccaccacgccgattcgccattttttgatgattaagcccgtcgccactctggatgatattttgcatcgcggcgactggtgcgcgcagctgcaacaggcgtggtacgaacatatcccgcttagtgaaaaaatgggcgtgcgcattcagcaatataccgggcaaaaatttatcactaccatgccagaaaccggcaatcagaatccgcaccatacgctgtttgccgggagtttattctcactggcgacgctcaccggttggggacttatctggctgatgctgcgtgaacgccacctcggcggaacgattattcttgcggatgcgcatatccgctacagcaagccgattagcggtaaacctcatgcggtagccgacctcggtgccttaagcggcgatctcgaccgtctggcgcgcggacgaaaagcacgggtgcagatgcaggtcgaaatctttggcgacgagacgccgggtgcagtgtttgaaggcacgtatatcgttctgcccgcgaagccatttggcccgtatgaagagggcgggaacgaagaagagtagctgatggagaggggcggtgctgcctctctcattcaggtcatttatattagtccttggctatttcggttatattaaataagaactctataaatttttattcttcgttggctccatacgtgtcttgctacatcactgttcaggagcatttaaatattatttgtagaactgagtggcaattatcgcagataatgcttaattcatcatcttagttcatgtttgagcgatttttgatagtcaaaaccccctctggtgccatacttttctcataaatatttttaaaatctatagctaacaaatattatgcaaagataatggactagcatcattgtcagtatcattcatttactgctctgtatgttatgaataattatgttgtatgtttgctcttaaaccgtgggaaggaggctataatggttgccaatattaatctcattaaacaagaaagttattctgttgttaatttagaaaaacaactttcccgaactgttaccaacaaaattataacgatgagcaagtaaagaccggttggtggcagtactgaccggtctgtgatgaaagattaatttcaccttaaatcctggtgctgttaggatgctgacgtttttcggctacaccattcagattatgcaaataaatatctctgaatataatatattcatagcacccataattcatcctgggcgataactaaaccatttttgagtaataaatgaaacaactgcaacactcttattatttctggaaaacgcctcgcaaaaacaaaacaacatgcaaaaatccgctttttttaaatgattttccggcgtaattttcgcacatacattaatgagtaatatatgtaaggtattggtaatggcgatgaatacggtttttcttcatttatcagaagaggcaattaaacggctgaacaagcttcggggctggcgtaaggtttcacgatctgcaattttacgcgaagcggtagagcaatatctggaacgtcagcaattcccggtgcgtaaagcaaagggaggcaggcaaaagggggaggtagttggtgttgatgatcagtgtaaggagcataaggaatgacaaaaatttttcattcttgaatataaaaaacagatgcccttattctggtattaatacaaggctgttttacttgaacttataataactgcaactgttacatcatatctggaaaacgcctcgcaaaaataaaaaatgatgcgtaaatgagctttctttaaagattcggcaagggtacttttctctccatagattcaaaaatgatattggcgagatatttatgaactctctggcaggtatagatatgggcagaattttactcgatttatcgaatgaggtgattaagcaacttgatgatctcgaggtgcagcgtaatcttcctcgtgcggacctattaagggaagcggtagatcaatacctgataaatcaatcgcaaacagcaagaaccagtgttcctggcatctggcaagggtgtgaggaagatggtgtcgaatatcagcgtaagctgcgcgaggaatggtaatgggaaaaaatgatgtcaatcagattgctgacaacgtgcgcgttgttcatgccggatgcggcgtgaacgccttatccggcctacaaagtcgtataaattcaatgtattgcagtttattggtaggcctgataagcgcagcgcatcaggcaatcttacgcttgtcatcagtctcatgcccataaccttattgatgtggtggtgggtaaattgaggccaaaccggcactggcggcatagcttgaggtggtaacgcggaatacgagagatggtgtcgtcacaccctatgagctgtaatccgggcgacctgcgccacccggaaaacgtcagagattactctccttcacccggaaacaggaacgggttgatggaactgcgggcatagccttcttgctccattcgtgcgtccagtaccagagaggcgaggtcatctgctacggcttcgatttttggatctttttcctgatagagaattttcaggtaagtgccgcagtcatcgcagctttcggctttaatcgcggcctgttcgtcatccagcgaccagtaatgcagtttgccgctctgctcgcagttgctgcattttacgcgcactacgtgccattcagtttcacacaggttgcagtgcaggtaacgtagcccctgagtggtgccaatttgcaccatgctggacaccggcatagaaccacaaaccgggcaatattgacgttgctcgccgtattcagcgcgggctttgccggggatcagattggccatctgcgcccagtagagcgacagtgcagcccagataaacggcgctttatcgctgctgacggacgagaaatcagaggcaaacagcgcgctggccatatcttccagctcctgagtcgatgccttctccagattctcaatcactgccagcgccgggccgctcatttcaggtttcagctcagcaatcagcgccatcagcagcttttgccagtgcttatcacgcggcagaacgtgaatatccagcgggggcttgccttgtgcgctggcttctttaatgcgcgcagtcagatccatctccagcggatggtcgtacagcaccacttcctgggcgtgggcgataagcgcagcaaagcgcaggtaatcacccagaggattattttctgccagctcgcgcagacgctcggcgcggcggttgtataaattcttgagccgagggaacaataacggcggaatcatatccgccgtacgtttctcgcttgaacccagctcatcttgcgggattatgcgaatactcattcagctttcttttccgttgtcttgcggacctcacggtaccagcgcgggtgatgtttcttcgcccaggcgctggtaacccatccttccaccatggcggtaatcgtgcctttcacccaaagggcggcgtagatatgcaccatgataaccacaattaacgccactgcggcaaatgaatgcagcattaacgcgaatcggatcaccgggattgagaaagcaggcgcaaaataaggacgccagataatcacgccgctcaccagcagcagaaccaggaaaataatcgccgcccagaaaacgcatttctgaccgaagttataacgcccggtgtcacctacttcctcgttgacgacgatcttacgaatattcttcgcccaaaagatatcatcccgattgattaggttgtgatgccagtaacggaaaaacatgatgatgaacgaggcaaacataaccacgccgacaaacgggtgcagaattcgcgccagctgcggtgtgcccatgatttgcatcaaccagttgaaggacgggaacaaaaagcccagcccgctcaccgccgccaggatgaagcagaaggcggtgatccagtggttgatacgttccggcgcggtgtagcgcacgatggtgtcacgtcgtttcatttgcgctcctcgtctttctcttcgtgcagattattctcttcctcatccgcacggttcggaccgacacccacgtagtggaagatactggccgcaaaggtagccgcaaagccaacagccgcgagcggtttccagatgcctttccagaatttcacggtttcgctgatttccgggttctccggcaagccatgatacagatttggcttgtcagcatggtgcagcacgtacatgacgtgtgtaccaccgacgtctgccggatcgtacagacccgcattgtcgtaaccgcgggttttcagctcagcaacgcgctcgctcgccagcgttttcatcgactctttcgtaccgaagtgaatcgcgcccgttgggcaggtcttcacgcaggctggttcttgcccaaccaccacgcggtcaacgcacagcgtacatttgtagacgcggttgtcttccgggttgaggcgcggaatgtcgaacggacagcccgcaatgcaataaccgcagccaatgcactgctcggactggaagtcgacgataccgttggcatactgaataattgcaccttccgccgggcacgctttcaggcagcctggatcggaacagtgcatacagccgtctttgcggatcagccattccagtttgtcgttctgctccacttccgagaagcgcattaccgtccacgatttggcgcttaaatcattggggttgtcgtacaccccaatgttattgccgacggtatcgcgaatgtcgttccactctgaacacgccacctgacaggctttacagccgatacaggtggtaacgtcgatgagtttcgccacttcttcctggaagtcccgcgcctgaggcgcgggggtcagaccgttagtcgcggaacgacgaatgatatcttgagattgataagccatatgtcgtctccgttacaccttttccacattcacaaggaaggacttaaactccggcgtctgcgtgttcgcatcaccaacgaatggcgttaaagtattggcaataaagccttttttagctacgccttcatagccccagtgaatcggaataccgatggtatcgatatctttgccgttcgctttcagcgtgcgaatacgtttggtcaccaccgctttggctttgatatagccacggttggaggagactttcacggtatcgccctgggcaatgccaagtttattcgccagcgactccccgatttccacaaactgctctggctgcaaaatcgcgttcaacagcgcgtgtttggtccagtagtggaagtgctcggtcagacgataggtggttccgacatacgggaacttatcggctttacccaatgcttcggcgtcgtctttaaagatacgtgcagccgggttcgagataacgtttggatgcagcgggttagttcccagcggcgtttcaaacggctcgtagtgttccgggaacggaccttccgccatcttatcgagggcaaacagacgccccatgccttcctgctgcatgataaacggcccgacgccgctacccggaggcgctgcgctgtagtccggaatatcccagccggtccacttagtgccgtcccatttcagcaactgacgcttcggatcccacgggttaccctgcggatctgcggaggcgcggttatacagaatgcggcggttaagcggccatgcccatgcccagcccagcgtgttaccgaggccagacggatcggcgttatcacggcgtgccatctggttgccttccggcgtccagctaccggcgaaaatccagcagccacaggaggttgtaccgtcatcgcgcaattgggcgaacgaactaagttgttggcctttcttgacgataaccgcaccggttgccggatcggtaatatcggccagcgccttaccgttgctctccatcgccacttcttctgaagatggctcatgcggaatggcgtagttccatgtcatgttcagcacctggtccgggttcgcgccaccccgttcggcatacatcttgcgcaagcgcaggaagataccggagaggatctcgccgtcagtcagcgcaatccccggggcgtccgcacctttccagtgccactgtaaccagcgacctgagttaacgatagaaccgttctcttccgcgaagcaggtcgatggcagacggaacacttcggtctggatcttcgacgagtcaacttcgttcagctcaccgtggttctgccagaagttagaggtttcagtgttcagtgggtcgatggtgacgaggaacttcagtttcgacagacaaccgatcactttgtttttgttcgggaatgaggcaacagggttaaagccctggcagatatagccattgaccttgccctctttcatcatctcgaagtattgcaggacgtcgtagcctttatcccacttcggcaaccagtcaaagccccagctattttccgccgtcgctttatcaccaaagaaggccttcatcatagagacgaagaatttcgggtagttgccccagtagtttacctggccttccagcagcggttttggcgtgttggcggtaaggtaggtttgcagatcggtctgcttctcgcttggcagcgtcatgtaacctggcaggctctgcgacagcagccccaggtccgtcagcccctgaatattggagtgaccgcgcagggcgttaacgccgccgcctgccatccccatattgccgagcagcagctggatcatcgccatcgtacgaatgttttgcgcaccaacggagtgttgcgtccagccgagggcatacaggaacgaggcagttttatcgtgagcactggtttctgcgatgtattcgcagactttcaggaacgcgtcttttggcgtaccacagatgttttcaaccacatctggcgtgtagcgggaaacgtgctgtttcagcaagttccacacgcagcgcggatgttgcagcgtggtatcgcgtttggcgaagccgttttcgtccagttcataagtccaggaggatttatcgtacttgcgtttttccgcgtcgtagccggtgaacaggccatcttcaaagccgtaatcctcacgcacgatcaggctggcgttggtataggcttcggtgtattcgcggttgaatttttcattgttcagcaggtacagcaatacgcctgacaggaaagcaatgtcagtaccggaacgaataggggcatagtagtcagctaccgccgccgtacgcgtaaagcgaggatcgatcacaatcagcttcgcgccgttgtgaattttggcttccatcgcccagcggaacccgaccgggtgagcttcagcggcgttaccgcccatcaccacgacgaggttggcgttcttgatgtcgacccagtggttggtcatcgcaccgcgaccaaatgttggagcaagacttgctaccgttggtccgtgtcagacacgcgcctggttgtcgaccgcgagcatacccagcgcgcgggagaatttttgcgttaaatagccggtttcgttactcgacgcggaagcacacagcatcccggtggagagccagcggttaacagtcacgccttcggcgttttgcgcaatgtagttagcatcgcggtcttctttcatcagtttggcgatgcgatcaaacgcctcttcccaactgatttgctgccatttatcagaacctggcgcacggtattccggaaacttcagacggctttcggagtggatgaaatccaccaggccagcgcctttcggacaaagtgcaccgcggttgaccgggtgatccggatcgccttcgatatggaagatagatgctttggcgttttttgctccgtcaccgaggctgtacatcaacagcccacagcctacggaacaataggtgcaggtattacgggtttcgcgggtgcgcagcagtttatactgccgggtttccgcgagtgctacgctgggtgcaaaacccagtgccgctgccgtggtgcctgccataccgccagcgcagatcttaaagaactgccttctgctgacctgcatggattgctccttgtttcgacattgtcacgtcccatttacattcgcttgctgcgtgtgcagggagtgggagttatttttctttgcggaaggggccgcaaaggtccagaattggctcaatttccctccatccaggaagggtttgtaacagaataccataatgttggtgtgtgtgttcttatctggttaagagaaagtgaaaaaaacacagcgaaaagaaatcgaaaatgtgacaaatatcacaggtgttcgtcaaattgagttatggcggcgtgatgatttacaacacccacggttagatgaggtcgcggaagaagttcccgttgcgctggtctacaacggcatttcgcatgtggtgatgatggcgtcgcccaaagaccttgagtactttgcgctcggtttttcgctttccgaggggattatcgaaagtccgcgcgatatcttcggcatggatgtcgttccttcctgtaatggtcttgaagtacaaattgagctttccagccgccgctttatggggttgaaggagcgccgccgggcgctggcgggacgtacgggctgtggcgtatgcggcgtggagcaacttaatgacatcggaaaaccggtgcagccgctaccgttcacccagacgtttgatctcaacaaactggatgatgcattacgtcatctcaacgattttcagccagtggggcaactgactggttgtactcacgccgctgcctggatgttgccatctggcgaactggtcggcgggcatgaagacgtgggtcgccatgtggcgctggacaaactgttaggccgccggtcacaagaaggggaaagctggcagcaaggtgcggtactggtttccagtcgtgccagttatgaaatggtgcaaaagtcggcgatgtgcggcgtagagattttgtttgcggtgtctgccgcgaccacgcttgctgtagaagtggctgagcgctgtaatctgacactggtaggtttttgtaaaccgggtcgggcaacggtttatacccatccgcagcgtttgagcaattaattaaaataagtcctgcgaaatatattaaattgcaggacttattcatttcgtgaattttattattttatttataaacaaaatgcgtgtagtggcgttttcttttttcatttattatgttcactctcttatctatatatttataaggcaattaaatgaaaaggaatttattatcttccgctattatagtcgccatcatgtccctcggtctgacgggttgtgatgataaaaaagccgaaacagaaacgctcccgcctgccaatagtcaacctgccgcaccagctcctgaagcgaaacctactgaagctcccgttgcaaaagcagaagctaaacctgaaacacctgcgcaaccggtggtcgatgaacaagcggttttcgacgaaaaaatggatgtctatatcaagtgctacaacaagttacagatcccggtacagcgcagtctggcgcgttatgctgactggctgaaagattttaaacaggggcctaccggtgaagagcgtactgtttatggcatctacggcattagtgaatccaacctcgctgagtgtgaaaaaggcgtaaaaagtgctgtggcgttaacgcctgcgctgcaaccaattgatggcgtggcggtgagttatatcgatgctgccgtggcgttgggtaataccattaacgaaatggataaatattacacccaggaaaattataaagacgatgcgtttgcgggtaatgactccaacttactgatagtgttttatgttcagataatgcccgatgacctgatcagactatgctttcgcgtgagtcagttagtgacataactcgcacgattaaacttcagcaattttttccggctattggtcgggaagtagatggacgaattgaagtattagacggtacgcgtcgtcgcgctgcctgtatctataacaacgtaaaattcgaaatactggttacaaaagacagtattgatattgccgacgcgagacaacttgcaaaagatatacagacagccagagaacatagcctccgagaactaggaaaacgccttgaagttacttatgggacaagtatgacaaaagaagagatcgctcaggctgaaagcatctctccggcaaaagtaacacgcgcatttcaggcggcatcagtaccggatgaaatgatctctgtatttccggtaatcaatgatatttcgctgtcggactatcaatttttgttgaaactgtctgaaaaggtaaccaacaaaaaaatgtcagtggaagagtttatggatagagttcgccaaaaactgatggctttacctgactatccaacaattgagaaaagcaaaatcctggcggtcttcaggtctgaaggaaaattgcttacagaccggcctgtaaaaacagttgaaactgagaagttgaaagagttttctgatcgtaaccaatttgccagaaagaagactgaccccagaaagcgtcttgttgtttatgagttctcccgcatatctaatgaagtgcagttagaaatcgatgaggctataaaaaacattctaagaaaactgcctgaatagggtatggcgggttaatatcaggatgccaaatggcatcctttttgtgcacagaacccccagctaggcactgtctcttatacacaaatccccacccggggatttgttatgtctgtcagtctgctttagggggactctttcaatccggtagtttccttcctccccggcagcgattttttgaactttttcttcacccgttgatcttctcttatatttcattttcttcgggtctgttatggtactttctgattgttattcatggactaatgagcagttttgacatacccgtctcggtgatccgcgtcgtacacgacgccttgtatcacaggcctcttctctcgctcagcatgcaggcctttctattgtgaaatcatctcagtccactgctcaggttgaaggtgcgtatcgcctgatacgtaacccgtctgtgtccccgcaagccattgccgaagccggatttaccgccactgcaagggcatgtgaggcacatccgctgctcctcacactggaagacaccaccaccattaacttcagccacagtacggcatttgatgaccaggggaataccaccactaacccgaagacgcgcgggctgctggctgatagaggaataccacaaggcgtgaaaaagtggtggtacatgtgtggaatcgctgcgaatgcagacccgggataaccttgagcgcatggtggttatcaaggcgtttatcgcggtacgggtgctgggcctgcggcagggaggcgtcagtgaagaaacacaaaatgacagctatgagaaaatattgacgccgacagagtggaaactgctgtgagttaagctggaaggaaagcagcttccggcgcaggcaccgaccctgaaatgggcctgactgaaactggctaaactggggcgatggcatgacagcaaacgcacaggccgccccggttgggtagttatgtgggatggctggttcagacttcaggatatatggttgagggttacctggtgatgaagtctcttgatcaggagatctgatcaagagacagggctatgccggaggatatttattgcaattttcaccacgcttttttcatgcttatttcactgaatataaagtgtttttttaaattctttcatagtgaaatcaccatgaattttctttttttcaaagtctggcgaccggtagttcgttccagcgggtagtgtatgccggtgacaacatctcacgcttcatctgccactctgttgccctgacggctgccggacgtggcgttgtatcgccggagaatatcgcgttcacccgctggctgacgcacctgcagaacggtgtgctactggatgaataaaactgcatgatgctgcatgaactctggttacagagcggtattggccagcgtcgctgggaaggattaccggatgatgtcagggaaaccatcaccgtgcatttcaccgccaaaagaggtgacaggtgtgactcctggagtaacgaggatgtttcagtgtggtggaaccgtctgtgtgacaacgtgctgccagaaaaaaccatgccgtttgaactgctgacggttctgcccacccgcctggatgttgaagtgaatggctttaacggtggtgttctgaaagatgttccctctgcatataactggtatacggaacagtatggcatgaagtggcctgtggggcgaactggaatggtcttccccgacagatgacgatgagctgccggaagtcaccggatctgcgtggatagtcgacaatgtggcgcattacggtggatgaattctgacggagacgggcgggcaaccgcccgtttcttttccggtaaaggatgtcgccgggctcctctttttactgcgccggctgacgcggcgcggcaggaacgctgcctgtggtcagtgtcccgcgtccggccgggcacgggacgggcgcttttaccgctcccggctggcgttggtgacagtgtacgccagcccgtcgcccttttctgatgaacgcccttcaagccgctttcgcggcatatcctcgccgtcaaaaagacgacggctgcggtattccacggtcggcctgacccgttaccggacgcggtgaacagcccacaggcagcggggaacgggcgccacaggggcgccctcccggtgccctctgtaagagaaggagtgctgttatgtcccgttttatccagggtgactgcgtgcgtgttatggccacgtttccgggcaatgctgtcgatttcatcctcaccgacccgccatatctcgtcggtttccgtgaccgtcaggggcgtaccatcgctggcgataaaaccgatgaatggctgcaaccggcctgtaatgaaatgtaccgcgtgctgaaaaaagatgcgctgatggtgagcttctatggctggaaccgcgtcgatcgctttatggccgcatggaaaaatgcgggattcagcgtggttggccacctggtatttaccaaaacctacacatcgaaggccgcatatgtgggctatcgccacgaatgcgcctacatcctggcaaaagggcgtccggcgctgcctcagaagccattgcccgacgtgctgggctggaaatattcaggcaaccgccatcacccgacggaaaagcccgttaccagcctgcaaccactgattgagagcttcacacacccgaacgcgattgtgctggacccgtttgcaggcagcggctcaacctgcgtggccgccctccagtccggacgccggtatatcggtatcgagctgcttgaacagtatcaccgtgccggacagcaacgactggccgccgtgcaacgggccatgcagcagggggccgcgaatgataactggtttgaaccggaggctgcgtaaatgaactatgccggacatgaaaaacttcgcgccgaagtggcggaggtggccaatgccatgggcgacctgcgtacaaccatgaatgagatggagcggcggtacagctttaatgctgacaccctgccggaacgtctggtgcgtcagacgttgtttcgcgcaaaccgcctcctgatggaggcatataccgaaattctggaactggattcctgcttcaaagattgaggggagagagtatgtacggaacatgcgaaatactctgccgggagctggcagcaaagtatccgggagacacgccgctgatgctggttgtctggtccccggaagagattcaggccctcgctgacggaatggatatttccctgtccgatcatgaaatcaggaccgtcctggcgcgcctggaggacatcccggaagaccagcggattgagtccggtatttcttccggcgtggcgatggagatcatcaataacgtgagagaaaaccgccaggtgaccgttcctgctgaactgctggcgtccctgattcagaccgctgaacaggcactgtggaaacgtgagtgggccgcccgtgataacggcctcgccgtcccggaatgcgtcacccgccgacaggcggtggttaatcaggcccgcgccctgctgaaaaacaacacacgcgaaaacgactgatgttatcgccgcctgtgggcggcgattcagggagaccatgaatcatgaacgaaacgctgaatgcactgatttgtcgccacgcccgtaacctgctgctggcgcagggctggccggaagagacggatgttgaccagcgaaatccgaactatccgggctggatcagcatttacgtgcggctggatgcaccccggctggcgacgttactcgttaaccgccacgatggcgtgctgccgccgcacctggcctccgccattcacaaactgaccggaaccggggcggaactggtactgtccggcagtcagtggcagtcgctgccggtacttccggcagacggaacgcaggtgtctttcccgtatgccggagaatggctgaccgaagacgaaatcagggcagttcttgatgcggtgcacgatgcggtacgaagcatctgttaccaggtggcagaagatgcgcggcgtatccgggcggcgctgaccaccaccggtcagacgttgctgatccgccagacgcgccgctttcgcctggtcgtgaaggaaagcgatcacccctgctggctcgatgaagatgacgaaaacctgcccgtagtgctcgatgccatcgtgaaccggggagcacgtttttcgtcggtggaaatgtacctggtcagcgattgtattgagcatatcctgtccagtgggctggcctgcgatgtgctgcgtataccggatgaaccgccccgccgctggtttgaccgtggtgttctgcgggaggtggtccgggaagcccggaacgaaatccgcagcatggcggatgccctggcaaaaatccggaaatgatgacgctggcggggtaaatccccgcctttttcctgccggtccccggacagagcacaaaggaagtcgccgccggctccgctttacccggccatgcagggcatggccttgtggtttttcagttatgtggcctcagcgtcgtgtgcgggctgtgccgtgcctccatcttagccgggctggcgttgatgcaaaggtacgcttcgccgctgcggtcacccggtccctccttcccgtctgccgtgattttccggtcgttcgcccgctcaggtttcgcggcctcaccctgcaactcccgtcagccgtgtgcgtcaggctgcggcttcccttgcgccctgtgcatccccgccttatcgcccggcttttctggagacacggcaccgcccggtgtcgcggaatatgtgaacaacggaggaaaacatcatgcaatatgcgaaacctgtcactctgaatgttgaagagtgcgaccgtctctcctttctgccttacctgtttggcaacgattttctgtatgccgaggcgtatgtgtacgcgctggcgcaaaaaatgatgccggaatatcagggaggcttctggcacttcatccgcctgccggacggtggcggttacatgatgccggatggcgaccgtttccacatggtgaacggtgcaaactggtttgaccgtaccgtgagtgctgatgcctgcggcatcattctgacttcccttgtgattaaccgccagttgtggctgtaccacgacagcggtgatgcaggactgacccagctttaccggatgcgcgatgcgcagttgtggcgtcacatcgaatttcaccctgaatgcaacgcgatttacgcggctctggactgattaacggacggggcggcaatgccgcccctgtaaaggagacgagaacatgtactgtactgttaaagaaattatccgcgaagtgctggatacagacgtgccggacagtgaatgcgtttttgccgtggtgctgacccgtggggatgtgcgccatatggctcaggactggaacctgtcagacgatgagctggaaaccgtcatgcagcggctggacgatgcctttgaatatggtgcggatgtcagcattgttcacgacgttgttcgtggactgatggaggaaaagcgcgccagccgtcaggtgacagtcccggcggtgatgctggaaaaagtgatagcgctggcaggcagtgaaatgaagcgcctgtatgccgtcgggagtgagaacgggggcgacggtgacgcattcgtcagggaagaacgcgaagcaatggacgttgtgttacaggcgctggacggggagaacatgtcatgaatatcagcacagaaacccgcgaaattctgcgcaattacaaagccgtgattaatgcgcggcgtcgtgaaatggggcagaaaccgctcaccactgcgcagattgttgatgaaatctgcgattttgtggtgaatcagcaggcggttttcctcggtggtcactacatccttcagggcagcagaaacaggtgatacagggcaggcggtggaggccgcctgtcagcccgcgcgaaaacccctggcaggctggcgcctgccggaagggaagcgggccacgctggcgcgtcgcccgttacccttcccgtctgtgatgtgtctgactcaggagtgtttctttcttatgttatggaactgttcctgatgttgttgttcctttatctgctgctctgattctgactactggtgtgttgttctgtaagccggccgccccttcggctcccggctgcctggcggcatccggtcgtcaggcccgactccgacaggcagctgctggcgcacccgccagtctccgccgaacccgctgacgcggtttcgggctgtcgctacggtccgatgcgtgaaaacccggccttgcagcgaccgttccggtcgcgccgcctctgtcgcgccgtggcctgcgctccctgcatcccggcaaaaggccgccgggatgtaaggggcaacgtcgtttcgcgcccgcgctctccgtcgttgcggcgggtccctgctcattgcctgccgggtgccacacacccgtttgagtccctgtcgccgggggctgatacagccacaacctgccgcactgactgtccagggtaaatgaacagccctcaaaattttttacccaaaacccggtaaaaaattttgcgttctgcccaggacaggtgcgtcaggccgtggcagtgatgccccttgcggcgaaggttctcaaacgggtgaagttcataccacagggaatacagcagcaggttcccgcgaaacgtcaaaaccgcggctcccgaaactcaacgggtgatgttctttaaaaatcaggatttatttcaggctccggcaatacgcatttatgtgttctgtcagtcatccggctggcaggtaatgagaacgcaggaacagaaggaggaaaacaccggaaagcgtcagatgcagatatgaaaaaagcaggtcagggacctgcttaatccacgccgtagaaatcgccgcaatcgattttcacggcttcactaacctgtgtcataaggagtttcatttatgacagtaagcattgtttcaccttccgcagcggctgtaaagccccgacgtcatccccgtttcagacgcgaagacatccccgcgccggacattgaccccgtgctgaaagccttcgggcgacacatagcccggagttttcaccgggggcgtggtgtacacatccccgccatgaaaaacacggctttcgggcaggtgctccgcacactcgaactgaaacgcgcttttaactgatgaggtgagccgccccgcgaggggcggcaacagacggaaggagaacattttatgacattagcagcaatcaccatgaccgccccggaagccgccagccctgtgcagatgtaccgcgcgacctactcaccggatgacaacaaactgcgcctgtatgccgtgtcacgtcttgacccggagacgtataaaaaagtgcatgatgctggttttcgctgggcaccaaaacaggcgctgtttgtcgcgccagcctggacaccgggccgggaagacgtgctcctctcacttgccggagagattgaggatgaagacagcacgctcactgaacgtcaggaagcacgggcggagcggtttaccggatacagcggaaagcgggccagtgaatccgcacaggcacttgatgaagtggaaagactggccgcgatgatcccgcccggtcagcccattcttgtggggcatcacagcgaacgccgcgcccgtcgtgatgcgcagcgtattgaaaacggcatgaaacgtgtcgtgatgctctttgaacgtgcggaatactgggaagaacgggcgcggtcggcactgcttcacgcgaagtataaagaacgtccggacgttcgctggcgtcgtatcaaaaaaatcgaagctgatttgcgcaaggctgaaaagaccattgcgcagtcgcagaaatatctgacgatgtggcgggctgaatcgctggatctgaatatggcaaaactcatcagcagtcatgaccatatcagcgcctgtttcccgctggatacgtatccgcgcccggcagaaaaaagccagtatgaaggaagtcgatcgttatggtcggccctggatgatgacatcatcaccacggagcaggcccgcgaaattgcgatccgctgtcatgaacggcagattcagcatcagcaacgctgggttaaccactatcagaaccgcctgatctatgagcgtgccatgctggacgaaagcggcggcgtggttacccggacacaggattttgagccgggcggacaggttttcagtcggggcgagtggctgaccatcatccgtgtgaacaaaagcaacggggcggtgagttcagtcacaacgccaaattacagttttctcgggtacagcggcacgatgaaagtgacgcccgatcgcatcacggactacaaagcaccatcggcagaagaggctgccgtcgccagtcaggccgcgaagcgtccgccggtagtcaactatcctggggaaggtttccgggaaatgacaaaggcgcagtgggccgccctgccccgggactgtaaggccgtgcgcagtgtggcagagacagaagaccacggtgcataccgctaccgccgcacaatggacaataatttccgcctggtgaatgtgtatatcaccgacatgaaaatcacggaaatcccacagaaataaggtatatccccccgggaaatccccgggggatgacggagataatgacatgcacagtcagttaagagaacgtatccggctgatgcgcgcaaggctggataacgccgcgccggttgctgaaatccgggctgaatctcagctttttgtgactcctgccccggtctgtgatcgcctggtgacgctggcggaaatcagcaaccgtgatcacattctggaaccctctgccggcaccggggccatactgcgggcgattcgggataccgcgccggaggccatgtgtgatgcggtggagattaacagtgggctggtccggtatccacatttaactgcaagggactttaccataaggttacaaccgttcatgtcataaagtgccagccgccagccttacagggtgcaatgtatcttttaaacacctgtttatatctcctttaaactacttaattacattcatttaaaaagaagacttattcactgcctgtcctgtggacagacagatatgcacctcccaccgcaagcggcgggccccaatcgaagccactttagttacaacacacaagaacgggctccaaaaaaaccccggtccggcgcagaactgaaaccacaaagcccctccctcataactgaaaagcggcccgccccggcccttcgggccggaacagagtcgcttttaattatgaatgttgtaactataaaacatcatcgcagccagtcttctagctggcagtcctcagtacacgctcgtaagcggcccttacggcccgctaacgcggagatacgccccgacttcgggtaaaccctcgtcgggaccactccgaccgcgcacagaggctctgtcatggctgaaaacgggtatggtctggcagggctggggatgggtaaggtgaaatctgtcaatcagtaccggcttacgccgggctccggcggttttattcttgtgccatatgcaacaatggagtgccgccttccatgccgctgacgcggcataccctggtgacgatatctgaatcgttatatactgtgtatatacgtagtaatgacgaggtgataaatggcacaggttaatatgagtttaagaatcgacgcagaactgaaggatgcttttatggccgctgcaaaaagcatggaccgtaatggctctcagttaatccgggattttatgcgccagaccgttgaacggcagcataatacttggttccgcgaccaggttgcggcaggacgtcagcaactcgagcacggtgatgtgcttccccatgacatggtcgaatcctctgctgcagcatggcgggatgaaatgagcaggaaggttgccggtaaatgatggagatattctggaccatgctggccagccaggacaggaagcgcattcgtgagaacattgcggagcagaacctgatggctgccattgaactggacgaacggattggttattcagccagcagcctggccgggcagccgtataaaggccgcaacggtcgtgtggaaggtacccgggaactggttattcacccgcattttgttctggtttatgaggtcgacagccagtggggaaaagtgtatatcctgcgagtattgcatactgcacagaagtggccatagaggggctgtccggatataaaaacgtctgacggagatgcaagaaccatgaataatgatgagctggtcaccagacgtgcgcaggcgattgccgaagacaggtgtttctcgaaaggacgtctgcgcgatgaattcagaatgaagccagcccccggtgctgagccggttaagtggtataaaaacacttatggtggcaggttcgctgtataccgaattgcagattgtgttccgatgcgtgagaaacgcccactgacgagtaaacaacttctggctggccagcgactttccgttttatccagacttaacagcaccagtggccggatggcacggcaggcatatgactggctgagtctggcaccgctctttctggatactgagacgacaggactggacaataccgcggaagccctggaaatcggcctgaccgatgcgaccggtcaggtggtatttgaaaccagactgaagcccacggtcgccatcggggcgcaggccgccgctgtgcatggtatcagtgagcaggctctctgcggcgcaccatcatggacagatgtggcgcggcaactgcgtcatgcaatcggggaccgaccagtaattatctttaatgcccggttcgacatccgcattctgaaacagactgctgccgcacatagcgatccggctgactggctggaagaactgacggtatattgtgcgatggagctggctgcaggatattatggggggccgcctggaattcggaaaataaaccacgttaagactgctttttatccaaatgactttcaggaatcacctagatggcgggacaacagtggttttggtgtcctaaatcgtacaattctgtacatcctcacaagggaatgtacggaagtaagccaaacggttatcggacggtcagaacatttcgtacagcctttacgttcagtgagttagctgcctggatgtaaccaatcgttcaactcaattttcttagcgtgggaaaatttccgctttccaagcggaccccaaaaagcgaaatttttggctgacgtcggtttcacccagattgtgctggcgcgcgagctgagccttgcgcaaattcagacgattcatcaggcgaccgatgccactctcgaatttttcgtgcatggcgcgctctgcgtcgcatattccggccagtgttatatttctcacgcccagatcagacgtagcgccaaccgcggcgactgctcccaggcgtgccatttaccgtacaccctgaaggacgatcagggccgggttgtgtcttacgaaaaacatctgctgtcgatgaaagacaacgatcaaaccgctaacctcggcgcgttaattgatgcaggtgtacgctccttcaaaattgaagggcgttataaggacatgagttacgtaaaaatatcaccgtccactatcggcaaatgctggatgcgatcattgaagaccgcagcgatctggcgcgcgcgtcttccggtcgcaccgagcatttctttatcccgtccacggataaaacgttccatcgcggcagcaccgattactttgtcaatgcgcgcaaaggcgatattggcgcctttgactcaccaaaattcatcggtttacccgttggcgaagtgctgaaagtggcgaaagatcaccttgatgttgaagccagtgaaccactggcgaacggcgatggcctgaacgtactgatcaaacatgaggtggttggttttcatgccaatactgtcgaaaaaatcggggaaaacagttatcgcgtctggccgaacgagatgcctgccgacctgcacaaagtgcgcccgcgacatccactgaaccgtaatctcgatcataactggcagcaggcgttaaccaaaacctccagcgagcggcgggtagcgatggatatcgaactcggcggctggcaggaacagctgatcctgacgttaaccagcgaggaaggggtgagcgtaacgcacacgctggacggtcagtttgacgacgccaacaacgctgaaaaagcgctgagtaacctcaagaacgtcctggcgaagctggggcagacgctctactacgcgcgtgacattcaggttaacctacccggtgcgctgtttgtgccaaacgggctgctcaacgtgttccgtcgggaagccattgagatgctggataaggcgcgacttgcccgctacaaacgcggcgtgcgcaaatcggtctccgatcccgcgccggtctacccgcagacgcatctgagttttctggcaaacgtctataaccagaaggcgcgtgagttctaccattgttatggcgtacagttgatcgacgcggcgtatgaagcgcatcaagaaaagggcgatgtgcctgtgatgatcaccaagcattgcctgcgttttgcctttaatctgtgcccgaaacaggcgaaaggtaacatcaaaagctggaaagcgacgccaatgcaactggtcaacggtgatgaggtgctgacgctgaaatttgactgtcgcccgtgtgaaatgcacgttatcggcaagattaaagatcacattcttaaaatgccgctgccgggcagcgtggtgggttccgtcagtccggaagatctgatgaaaacgctgccgaagcgtaaaccttaatcctttgcgacatcagcccggtggcgtttaccgggctgatgtgttggtatttatttccgccggttaacgcctggcccaaagccgacatccggcgaggtgtccgcttaatgcgctttaaaccccgccgcagtcatgagcaggcgaaaaaacatgcccaccgccgccagcgccaacacgctgccgccccaaaggatgaccagccacatcaggcgtttccagagagaatgttgcatcagtgatacccctcgccatgttgcactttgccgcgaaacacatagtaactccagaaggtgtacaccaaaatcaccggaatgatgagcagcgcaccgaccagcataaacccctgactctgggcgggggcggctgcctgccagagggtaaccgaaggcggaataatgtgcggccagatactgatgcccaagccgctgaaaccaaggaagattagcccgagcgtcagcacaaacggaaacgtgtggttttccggacgacccagtgtgcgccataaccagacgctgaacgcgatcaccagcaccggaaccggcagcagatagcccaggttgggaagcgtaaaccaacggtcggcgatcgccggatgcgctaacggtgtccagaggctgattatcgcaattgacaacagcagggccagcagcagttttttcgcgacgctgcgcattttatcctgaagcggattttcgcttttcatcaccagccaggttgcgcctaagagcgcataggcaacgaccagtccgacgccacagaacagagtgaagggggttaaccagtcgaacggcccgccgctgtagctgcgaccggtcaccgggaaaccgttgatcactgcgccaaccacgatcccttgggcgaaggtagccagaatcgacccgccgagaaaagcatggtcccaaaatgggcggtgggctggcgtggccttgaagcgaaactcgaaggccacgccgcgaaaaatcagtccgatcagcatcagcgtcaacggaatggtcagcgcatcgataataaccgcataggccatcgggaaagccccaaacagccccgcgccgcccagcaccagccaggtttcattaccgtcccacaccggcgcgacgctattgaccatcacatcacgatcctctgcgtttcgtgtgacaggaaacagaatgccaatacccaaatcgaatccatccatcacgatatacattagcgtggcgaaaacgatgatcacaaaccagataaccgataaatcaatacccattagcgatgtgccttatgttgagaatcgaggactgcggcggaaagcggcctggcgggtgtgcccggcggcggcgcggaatcatcttccagcgggcctttgcggatcaggcgaatcatatagctgtagccgacgccaaagactgagctgtagacaacaaagaaagcgagcaacgaaatgctcatatgtaaatcgccgtgggccgacaccgcgtcggcagtacgctgtaaaccgtacaccacccacggctggcgtccgacctcagtggtcacccagcccgcgagaatggcgatgagccccgagggtcccatccatagcgcagagcgcaggaacgggcgcgaggtgtagaggcgctgcctgtagcgcagccagagcgcacagagccccagcaggatcattaacatgcccaggccggccatgatgcgaaatgaccagaacacgatcgtcgagtgagggcgatcctctttggcgaattcttttagcgccggaacctgtttatccagactgtgcgtcaggatcaggcttcccagcgccgggatcgccagtccatagcgggtgcgttcctgttccatatccggccagccaaacagcagcagcggcgtgggctcacccggcgggttttcccagtgaccttcaatcgcggcgattttggctggctgatgtttcagggtgttcagcccatgcatatcgccgattaacgcctgcaccggcgcgacaataagcgtcatccacaacgccatggaaaacatcgtgcgaatggctggagttgtgttgccgcgcagcagatgccaggctgccgaagcgccgacaaacagcgcgctactgagaaatgcggcgacggacatatgcagcagccgataagggaacgaaggattgaagataacggcgaaccagtccacgggcacaacctggccgttgacgatctcaaacccctgcggcgtttgcatccaactgttagacgccaggatccagaaggtggaaatgagagtgccaagcgccaccatgcaggttgagaagaaatgcaaacccggaccgactttattccagccaaacagcatcaccccgaggaatccggcttcaaggaagaaagcagtcagcacctcataggtaagcaacggcccggtaatactgcctgcgaattccgaaaaaccgctccagttggtgccgaactgataggccatcaccagaccggaaaccacgcccatgccgaaatttacggcgaatatttttgaccagaagtggtacaacgagcgccagaccggatttttgctttttagccaaaggccttccagcaccgccagataactggcaagcccaatggtgatcgccggaaagataatgtgaaatgaaactgtaaaggcgaactggatccttgccaggtgatacgcatcaagaccaaacatgcctgactccgcattaaaaattgattcagcgcaattctaggcgtgtgaggcaatgaggggcagaaacagaacaggcatatttaaccataacagtttgcaaatcgttgtgaattttattcactgttatacactgcgaggctcacctgcattgaccgacgagaaaccagaataaaaaaataccagcgtctggctgaacaactttgcgaacagatcgcctctggcgtttggcgacccggcgatcgtctgccgtcactgcgcgaacaggtcgccagcagcggcatgagcttcatgaccgtcggacatgcttaccaattgctggaaagtcaggggcgaattattgcgcgtccgcagtccggctattacgtcgcgccacgcccgattctccagccgaccgtgcagcctgccctggttatgcgtgacggggctgtcgacatcaatacctctatttttgagatgttacagaccagccgtgatgcctcggtcatgccgttcgcctcggcgtttcccgatccgcgcctgtttccgctccagcaacttaaccgctcgctggcgcaggtgagcaaaaccgcgaccgccatgagcgtgctcgaaaatctgccgcctggcaacgcagagctgcgtcatgccatcgcccgtcgctatgctcagcagggcataacggggtttgagggccaatgatgtaaaaaaccacgctaaggaggtaattcattgtttaaattgagatttaacggcctcaattcccccttcataatatcctccggtagtgtgaacgtataatgtcccagcatgttgatatgaccatgcatcagaggcgaaagccgcgcgatatgttcatcttctggcccttccccagtgctacgcaggtgcgacaaggcttcctgcatataaagcgtattccacagcaccactgcgtttgtcaccagacccagcgcacccaactgatcttcctgcccctcgcggtaacgttttctgatctcaccacgctgaccgtagcaaatggctcttgccacggcatggcgaccttcgccccggttaagctgtgttaggatcctgcggcgatagtcctcatcatcaatatagttgagaagatacagtgtcttgttaactcttccgacctccattattgcctgagcaagccctgacggtcgggtacttctcaatagcgatcgaatgagttctgacgcatgaattgtgcccagcttcagcgaacctgcaacccgcatcatctcatcccagtggctttcgattttagaaaggtcaacacaaccccgagccagttcgtccaacgccccgtaattcgctgctttgtcagcccgccagaacaccgcctcaccagcatccgccagacgaggtgaaaattggtatcccagtagccagaacaagccaaagataatgtcactggtacctgctgtgtccgtcatgatttcaaccgggtttagtcccgtttgttgctcaagtagtccctccagcacaaaaatggaatcccgcagcgttccagggatcactatgccatgaaaacccgaatattggtcagagacaaagttgtaccaggtaatgccgcgccctgaaccaaagtattttctgttggggccagaattcaccgttttcactggtgtgacaaaacgcataccatcagcggaggccacctcaccgccaccccagtatcctgccaacgctaacgaggactgaaaatcaaccagccgcgcattggcgctgaccagcgtttctgctcggatgtagttctgtttcacccagctcaggcgatggcgggtcagtgcagggatattgtgcttgatcagcggctcatgtccgatattgcaggcctcagccagcatcaccgcacacaggcttatatgcagatcctgcgcgcgggcacctgactcgctgacatggctgaattcacgggtgaaacccgttctggcgtcaatctcaagcaacagttctgtcaggtcaacgggtgggagcaattgtctgactcggctgctcagtcgtatcagcgccggtggctcatccaatttatccaggctgctgatggtcagcgaaggatgtttaccttcattgcagatgtctacggcggtattgcggtcaaaacgtgatgccaccgttttccaggtttcatccaaccgtgctgccaattgcaccgatgctttactgccattggtggggtgacccaatgcccggcacactggaacccgctgcgcctgccattcctccccctgaagaagtttttggcgcggatcaccccaacgatcgctgttttccaaccagatgtcacgacggcgtagcgcatcctgaagtcgctccagcagacacaacgagtaacccgctcgctgtatccgaccttcagcatcgtacaccaggcgtttccaagggcctgaaatgatatgctcaggtgcatcgtccaggatccgttttttcgagccgtttagctctgccaggtaatggatggccgcgagggtatgttcaccgtctggggccgcccggaagtgcagatcgcgcagtagtgcgggcaaaaaacgccttacccgtccgtactgctccaccatttcatcctgaaagtttgtatcctgggggcgggccagttcattcactttttccactgactctgccagtctggcgacaggtacactgctgaatatggtctttcgcagcaaatcatcaccagtatcttcatcaagtaaaagtgcacatgcccgcgccagcaacaacgccgcacggtcaagatccttgagcgtcctaagtcgctttttctgcccggttttcttcgcctccctggtaatattgaggatcagcatatccagcacgtcaacggcctcgtccagcgccgagatttcttgcgctttcacgaacgcggtaaggatagccagccgccgttcttctggcattctgctgatatatttcaccgatgccattccggcatagcgtgccaggttgcggagctgtatggcaggcagcccagtgaaattcaggcaggaaaattccaggctgcgcaggcgagtgtaacgttcaagtgcttcagtgaatgcggggccgctgatagtgacagggcctctttttaggtgctccatcactgagagtcgctgtccttcggggatttcaagtaacccagccagttgtgcggcctgccaacggtttggcagcgcggccaattttcgccataagcggcgggtcgcacgctcacggatttcaccaatgaccctcgtaagggtggatgcggctggcaacaacactttattttgaagcaaccacgcggtggcaaaatcgaacatcagtccggggcgttcattactgagccatgcacgagtatacagcaatcgcttcagtctgaacgaccacgggaaatcaccgaaatcatgatagctgtagtgctgcctgataagcccgtggtgctcccaacgtgtattttccctttgagcatagcgggagatgatctctggatagcggatgttaagttgccttgcgacataaaactggacaccgggcggtatttgcatgagatcgggcaagaaggttcccagaaagcgggcggttgtgagttgaagggcaatccccaaccggttatgcctgcccctacgtaggttgatgaaagtaaggtctcgctcatcaagatgaaaataccgtgccagttggatctcgtttggctctgcggcataacgcccgtagttctgtgtctgtttgtcggtcagaaaatcagcagccatcacgcatcctttcattatttattgatccgtattattttggcggtatcagatattataatttttgagaccaatgaaaacggccctaaacataagtatcaaaaatcgtgatttatgccttatgatactacgcagtatcaatatcgatttatgagaccaaaatggcattattagggtatgcaagagtatcaaccagccatcagaaactgacgagccagattactgaactcaacacagcgggagtgagggatgatcgagtgtttactgacatgatgtcgggagcaactgatgagcgcgaagggctacagcgactccttgccagagcggagaaagatgacattattctctgtactaaaatggatcgccttggacgtaataccgcagatatgattcgcatcgtggatacttgctataaaaaaggcatcgctattcgctttcttgagaacgggcttagtactgaaggcactatgggaaaaatggttatccagatattagcagctgttgccgaggcggaacgtgaaaggatcttggagcgaactaacgatgggcggcaggcagctatgattaagggcgtcaaatttggaagaaagcctcataaaaaggctgaattagctaatgaattgatcaataaggacgtacaagttaaagaggtaatggaaaaaacgggtatatcacgggcgacgtattttaggctgaaaagaaaaacggttactaacaatattcatctttccaataataaataagaaagatgagcattcttaaatgcctgaacggcttctatttagcaatgtttaaactcgaaaaaaggatgtattcaaattgagtcaatatttaaagcttggagatgaccaatctccggttcagttggacccacacagcgaagttggtgcatttaaagtcgttggacactgcgcatgggcaaaaccagaagataaaatcactcctgactttttgcgttcaagagtagaaccttggttaactgccctttttcagtctgaacacttaaatatacttattggcgctggccttagttcggctattcaagagtcagcgaccggcaccaaacctcaaggtatgggatggattgaagatctcaaagtttgtaaggctgaaatagacagttatgtagctaaaacagcagacgcctcaggaaggggaaagggtaatattgaagatcagattcgttcaattaatgagttgattaaaggattagagattttaacggtacaaaacctaccggttccactacctccaccaggtgctcccccatatcgaaatttaaaaagtgagttagtagagttaaataatgagctaacaagatgtctgaaattattttcggactcagttagtcatggggaaaaattaattcgtgatgcaagcaatgatttaaaaacagaaacgtttaattatttagtgagttttttgatgagtttttcaagtcgaacagcaactagggatcgattacatatttttacgacaaattacgacagaataattgaaacgggcgctgaaatagcaggtcttcgtttaattgacagatttgtcggtaccatagcgccgatttttagatcttcgcgattagaagtggattatcattacaatccaccaggtattcggggtgaaccaagatatttggaaggtgtggcgcgctttactaaattacatggttcattggactggtatgctactgaaggggctataaggcgttttggattgccatttggagctagctcggttgaaccctttttacaagtggaaacagccggaactgcaaattatcaacaattaatgatttatccaaattcagttaaagaccgtgaaacatctgaatatccttatgttgagctatttagggatttagcatctgcaacatgtcgtcctaatagcaccttggtaacatatggttatagttttggagatgagcatataaatcggcttataattgatatgttgacaatcccctcaacgcatatagtcataattgcttacggtgatccgcttggaagaattatgcgttttataaatgatagtggaagaaaagctcaaatatctttattgctgggagatcattttggagatctaaaaaaattagttgatttttatcttcctaaagccgcgatagacagatcatcaattcgtatggctgagctattaaaatcacgaggtttatatcgtgcaacaaaaccaaataatagtgaggatgctgaatgaactcattccccattgaacaaggtgagcaactcagggttggcactgtcgattttgtttcacccaacgagattagggcactattagatatcgactcgcctgattctgtcgctttgaatgcaggaacacctagaaattttcctagagtaaacagctatgtattagtctcatgtgacaatggttacttagttgggcaaatagagtggcttgcagttgagcattcgccttatcccaaacaaagggatatccaagattttggtttagtaaatctgccattccctcgaaaaaaaataagtttaaatccggtagggaatcttaaacgtttttcaaaagatggtactgattattttatatttcaacgcggttctgaatcatttccttctattggttcagctattttactaccaacagatttacagcttagatcaattgtcgagtctggtaataataggcgggtgattattgggcaaagcccacttgctaacaatgctaatgtggctgtagatcccgacagattatttggtcgtcatatagcagtacttggtaatacgggtagtggtaagtcttgttctgttgcagggttaatccagtggtcactcgaggctgcaatggaatcagaaataaaaccaaacgcaagatttattatattagacccaaatggcgagtatacacgtgctttggggccaactacaaaatttaaaggcagagtgtttaaggttgaagcagaagatggtgaaaaccaattacaggtaccttcatggttttggaatagttcagaatgggcatcattcacgcaagcaagtcctaaagcacaacttccattactaaagcgctctttgagagcaatgagaaatgaagagtttgatttacaaacgaatttagatgtagaagttaaaaagtacttaggtactattttagtttctttaaaagcggataaatctaaaggtgcagcagcacttaatgatttcccaggtgctaaaaatcttttggcaaaaattaacacttggcgtcagagtcttgaagaatataaagaaaggttagttactacacatccagagctagataaattaatcgtctctattcaagatttttgtgtgcaaagagagggtagatatccagattacaatgctaaagttagcgcagttgataacatcatagatggaatgttatcttcatttcagagccttggtggtaatgagtgtgaactccttccgaaaaatgaggacatccccgtcccttttgacggaggtaatttagtttcctatttagaggcattagcccaggaaaatggcagtgagcaatatgtcgaatatttagtggctaggatacgcacaatgcttgctgatacgagaatgaaacctataaccaatgactcagagcaccgagttgacttagccaattggttagaaacttatattggaaaggatggaaccggcgatgatgatagctgtgtttcaattattgatctttctttagtaccaacagaaattactcatcttgtgacagctgttatttcaaggattgtgtttgaatcattgcaacgttataggcggctatataataaatctttacctacggtacttgtcgctgaagaagcacatacatttattaaacggtatcgtgatgactctgaaaatcaggatgtcgcagccgtttgctgccaagtgtttgagaaaatcgcacgagaaggcagaaagtttggtcttggtatggtgatttcctcacaacgaccatcagagttatcacctacggttttgtctcaatgtaatacttttcttttgcatcgaattagtaacgacaaagatcaggagcaagttcataaaatggtacctgataatttgcgaggattactccgtgaactaccttcattaccatcccaacatgcaatactgatgggctgggcatctgaacttcctgtcctagttaaaatgaaaaatttgacgaaagagcagcaacctcattctgatgaccctgacttctgggatgtttggacaagaaagtatgcggatgggaagttggtcgagagaactgtcgattgggaagctgttgtaaaggaatggcaacaaaagtgatctgcagcagaaaatgaaagcgggagagcagatcggaattgaaggaactttatgccatcaatctacttggtgttgcgttccattgtccctccccccatgacgactgaagtggctgcaaacgcagtacctaacaatctcaatataaacaatgaactaacctcttagcgtggttttttgcatcattggccctcaaaccccataaccgtctcgccggatgacattgtcatcaccgccggtgcgttagaagcgcttaatctgagcttacaggcggtcaccgagcccggcgactgggtgattgtggaaaacccctgtttctatggcgcgctgcaagcgctggagcgattacggcttaaagcgctgtcagtggcgaccgacgtgaaagagggaatcgatctcgcggcgctggaacaggcgttacaggattatccggtaaaagcgtgctggttgatgaccaacagtcagaacccgcttggctttacgcttagtccggcgaaaaaagcgcggctagtcgcgctccttgacaagcataatgtgatgctgattgaagatgacgtgtatagcgaactctactttggccgcgaaaaaccgttacccgccaaagcctgggatcgcagcgaccggatcctgcactgttcttcattctcgaagtgtctggttccgggctttcgcattggttggttggctgccggcaagcacgcccgcactattcagcgccttcaattaatgagcacgctgtcgaccagttcgcccatgcagctggcgctggtcgattacctgtctacccgtcgctatgacgtccatcttagacgcttgcgccgtcagcttgctgagcgcaaacaacaggcctggcaattgctgctgcgtcacctgtctgccgacgtgaagatccatcataacaacagcggctattttctctggctcgaactgccggaatcaatggatgcaggagaactgaccgcgcaggcgctggcgcaccaaatcagtattgctcccgggaaaatgttttccacctcggacacctggaaacgctttttccgcttcaacaccgcctggcagtggggggaaagtgaggagagcgccgttaaacaactcggtcagcttattcgcgaacagctgaaatagcgcgtagtagtgtgtaaagcaggttctgattattcatgagcctgcttttgcctgtcattcataggaaatatcaatacccgtcaattttccttttgctcactaacgccttgtctatattagggaagagggactctttacccttgtccgcgacgtaatgcgtgttacatcacatcctggtcaaatttcttctctccgggcggtgggctttctgtgcgccgactattctctggaaagaacaacattccgcggtacggctgtcatgacagcgtcgccggaaacggtaaataaacaatgacatgggaaaatgctatgcaacatctcttactgattaagggctccgtttgggaaacggactctatggtcactcccgtttttgcaacaccgattttgacgataagtgggcttgcttgaatctatccggcgtctgaatgggattttattcccgcgcctcgatgagttccgcgcctgatgaacctcaagaaaatatacggcttcaatgagcctttccgtttcacaggttcctcaacaggccggtgggccgttcgtatcatcaataatcagtatcagcaaaaccagatgagtgattgtttaaacagatataactctcactatgcttcgtaagtttgctgccgtgttgttagtgcccaggctattctggccagcttgtttgccagagcgcaagtcacgacaaagttacttttccggcacagtaactcccggacccagtcggccaacctgcctgactggtgttccagtttttgtataaatactctggcgcactgaaccagcaaggttcgtatcttcttgttgcctcgcttgctgatgcccaacaatgttgtccgcccccccgtgctgtattgtcgaggtaccaaccctgttgcggcggcaaagtctcggctactggcatactgcttcccgtcgccaatctcagttgaaatagtacttgcagttagtgttccgacacagggaatactcagtaaacgctgacctacttcatcttcgtccagctttcgtttcaactgggattccagctctttaatctgctcaacaagatagtgataatgttgttgtagtttcagtaataactggctgagataaagaggtaaattattgtcctcaagaatagtgctcagccgactaataactgcagaacctcgtggaacgctgataccaaattccagcaaaaaagcatgcatctgattagttgtttttaccttatcctgaaccagggattctcgaacacgatgcagagcccgcattgcctgctaagattccgttcggggttgcacaaaacgcatcgatggacgcgacgctgcttcacagatagcctcggcatcgacgaaatcatttttgttgcttttaacgaatgggcggacaaattgtggtgatatcagctttgggaaatgtcccaattcttccagcttacgggccataaagtgagaaccaccacaggcttccattgcgatggttgtagctggacatgtcgccaaaaattcgatcaactttgaccgggtaaattttttacggtaaacagccttcccgcgacgatcctggcaatgaatatgaaaagagtttttacccagatcgataccaatgagcgcaatgttttccatgatagttctccgaatgaaagcctgtcctctgcatagtaccaggaaggagggagtgaccatctcattaaatattccacaccaagactgttttttgtacgattcgatacgacaagaggactgagtttttttccttgtctggacagtatctggcctagctgaagtgacgcttcccgtcaccggagataataacgtccgggcagtggtcctcctttacatgcagggcgcattgttacatcttcgcaaatttggggaaataccggaggaggagcaacttaccaagttatcgccaatgaaacactgtcatataaatatgctgaagtattatacgttttcactactagaagatagtctgaagggcgagcgaagaccattaaatttcaaaacaaacaataaattaacctcttagtgtattttttacactcccctcctccgaactcttccatactttcgatatccaattgattagcgcgagatattttctctgtggttctttagaagagatgttagtaattgcaatgtgtaatatttttataatgtaactatatgctttttattatttatattgatagtaccactttgattttatcagtaaaatctctgcatttttgatcgagcattaattgtgcaaatgcataaataatacggagtattatgtttttttaatataaactattagtgattaattttttatatattcgatttttttatcgttcatactactggtgattttaattatactaattaaaagtgtggtttattaagtcgctttttttgttaattaaaattagttttagcctaaaatcatagcgcaaagaaaacaatggtcgtattttagtcaccaaaaaagatgtgtcaggaccgatattgcataagtttcaggttgaatatcaggtctgtaattagagaaggaaagaaataaactgtcaccccataatcagtcaacatattgatttaaaagaaataatttatttatcctttgcgattcagcttgatagaaatgacaccaaagtttcaatagcgtcaggaaccatgatttttttgtatatatatggctgggtataatatggaattatttgatatttgataaaaaaaatacaacgagggagacaattaggaccaaactgttaagcgaatcttaaatagattaacttaaaaatgcaacattttcttacgtattcttcaatttgcatttaatcttttaaaaatcaaatagtaaggattctgctttgattttttcataacatctgcgattagatgttcgtttttattgtttttatattcagtatgtctattatttttcaccattaaataaccagataaacgtctggttttttgctattatttagcattaataataacaaaaaatggaattaaaagcatttttttctaaaacagtgcagtttgtcaaaatggtcctaattgacaaactggtggcagccttttttacagtgtcagttgttcatctgagaacaattcctgagtaggaaagacatgatgtcgtggtgattttttgaaattaataagattaaagtaaggagcacatctgatgttaagtaaacaacatgttaccaaatctattttgggactggcgctgttgtctgcagttcctgtggcaagtgcagctgttgttactggaggaacagtacattttactggtcagattgtaaatgcggcttgtgcagtaagtgccgagtctgtagaccaaatcgtaaagatgggacaatttcgtacagctaactttacctctgtaggaatgcgatctcacgcagttccgttcacgatcaaacttgaagactgcgataccaatatatccacaaccgcagcagtttcattctacggcaaccttgatgcaaatgatccaactgtattagctgtgagtaatatttccggtggagcttctggctcagcctctggtgtaggcatcgagatttctgactataccggtaagcttgttaaacctgatggttcagtcttctctactgcgcaaaatctcgttgatggcgccaatgtattaagtttcacagcccgctataagtcaactctggcatctgtcactcccggtcaggctgatgcggatgcactctttaaaatgcaatacaactgattatttgccctgcgaagattgctgataacagcagtcttcgcaaataaactggaggcgagcgtgtacaaaaaaaaattgtgcgcagcagttacgctttggctcagtgtgtttgttgatgcttcagccgggaaccgtcatcatgttgtgattgatgggggaataactcattttcgtggaatattaacggctgaagcctgcactatttctactgacagccgcagccagacagtaaatctggggcaattccgcagtaatcagtttaatggtgtgggaagccttacctctccggttggttttagtatacgcctcactgaatgcagtacagctgtcagtgatcaggttaaggttgcattctatggcgttacagatggtaaagatccacaggtgtttaaagcaggtgaaggggtaaatgcagcgtcaggtatagggttagcgctgtttaatgagctggggcaaattattgaaccaaacactcattccggtttcctgagtcgtttgcacgaaggggataatactcttcgctttcatgcgcgatatcgtgcgacatctcgtgaggtaacaggtggaaatgcaaatgcttttacctggttcgctcttacctaccaataatcacgaaacgataatttatcgtgattcatattctgtctgtaatgaataaaagcgaggttttcgtgttttattatcgtttttacaaaagcataaaaaaaatttgcttggcgggaatttatatattattcgcatttccgtctatttcctgggcgggaggaattgctctgggggcaacaagagtaatatacccttctgatgcccgccagatttcgctgtctgttaataatagtgatgaacataacagatatctaattcaaacatggattgaaaatgacgctggaagtaaaacagaagactttatcgtcacaccaccattatttgtaagtaatccgaaaactgaaaacatgcttcgtatcatttacacgggcgaggatgttcctcatgatcgggagaggttgtactggctgaataataaagccataccatctgtcaataaagatgaaattaaggataataatgttctgcaaattgctgtgcttgccagaattaaactttttgtccgcccggcaggtttatcagaaaagtcagcagatgctccatccagacttacttttagtcgcagtaatggcttattgaagattaataatgcttctgcattctatgtgacacttgtgaatatgtctataaatgacaagaaactggatacagcgatggtgcctccaaaatcgagcataatggtcaatttacctaagggtgtgacggtgggtaaattaagttatcagacaataaatgattatggggctaacactcccgttacacaagttaaaattaactaataaaaataaccagataaaaacattaaatatcataactaagtaccagagcgcggtcagaaagtagtgactgccagttgatgctgccaaaggagtaatttatgcagtatttcaaactgtcggcattttttaacagaagtgccgtatggaccagattatccctgatgccgtatctggcttttatgggagtgggcatgcagtttagctacgcagaagagtattttaatccagcctttttgtccggagatccttcgctcgttgcagatttatctcgtttttcgaaaggagaagggcaaccagctggtatttatcgtgttgaaatttatattaatgacgaatatatcggtactcaggatattcgttttgatgttctggataaaaaactaaaaagtgtagacaatacggggctggttccttgtctttcacgtgcctggctggaaaatcaaaatgttaatatccaggcttcacctgtcttgatgaagctgacagaggaacaatgtgcagacctggctgcatcatttgataaggcacaagctcactttgcatttgagcgtcagcgtcttgatatcagtatacctcaggccgcgttcagaaataatattcgtggatatattccccctgagcgatgggataatggcgtcactgtggggttaatagattactcattctctggtagtaatagcaagaatacacataacgatataaactataatagttactttttgaatcttaatagcggaattaatatcgattcatggcggctacgtaattatagcacgtggaattatagtgataacgggcgttataaaaataatagctggcgtaatatcagcacttatgtacaacgtaatatcattccgttgaagagcactctgatattgggtgatagctatacagaaggggatatatttgatggtgttggctttagaggcatacaattagccagtgacgacagcatgttaccagacagtatgcgtggttttgcgcctacaattcgtggtgtggccaacagcccagcacaggtgataattcgccagaatggatatgatatttatcaaacttatgttccggcaggagcattcgaaatcacggacctttatccgacatcaaccagtggtgatctccaggttactgtaaaggaaaacaacggctcaatcagtcagttcactgttccatattctgccgtacccatccttcaacgcgagggacgagtaaagtatgcactgacagcaggagagtttcgctctggctcagacctgcaggactcgccggatttctggcaaggcacgcttatttggggcttacccgcaggtgttacattgtatggcggaactcaattttctgacgattatcagtcaattgcttttggcgccgggaagaatctgggtaattttggcgcattctctgcggacgtaacacatgcccgtagtactttaccagatgatagtcagaaagaaggtcagtcattgcgttttctgtacgctaaatcgctcaacgattatggtactaactttcagttactgggttatcggtattcaactgagggattttatactctgagtgaaacagcatggcgtcagatggaaggatatcgtcttaaaacacaggatggacctgtcgatacacaacctgagctgcttgattatcacaatctgtactacagcaaaaaaggaagattacaggtaaatatcagccaacaaatttctgatatcggaaccgtatacgtgaccggtagtcaccagacatactggagaacaaatgagaaggaagagttgtggcaggtggggtacagcggaaactgggaagatatcagctacaaccttaattggtcatggaataaaagtcctggtctgattaatacagatcgccggatggcattcaacatttcagtaccattaagtcgctggcttacaaattcaggtaaggcacgtgatatcaccaactcaagtaacacggcttatgcaacctactcaatgacgcatgactctgatagtcgggtaacacagcagacgggagttagcggaacattactggacgataacaacctgggctataacgtgcaacaaggctataccactaaaggtattggtaataatggaatagccagtctgagttaccaggggcgttatgcaaacagtaatataggttatagctacggtaagcattatcaacaggttaactacggtatcagcggcggaattgtggcacatgctgatggagtgacgcttagtcaaccgttaggcgataccaacgtactggttaaagtccctggcgtggatagtgttcgcatacagaatgcaacaggtgtaagtactgactggcgcggatatgccgtattaccttatgccaccacttaccagtctaatcgtatagctctggatatgacaacattgccagataatgcagaactggacaatgcggttactcatgtggtgcctacaaaaggagcaatggtacttgccagctttaatccacgtattggagcaagagcaaaaattacattaacacaacgtaatggcaaaccaataccttttggggcgttagttagtgacgaaaccggaggagggggcatagtgggtgatgcaggtgaggtatttatgcctggtctgaaacctgagggtatgctcaaggttgtctgggggcattcggcatcacagcaatgcatggcaacgtatcagctggaaaaaaagacagaaaagcgcggtatcagctatacacatgctgagtgtctgtaaatgagaggttcgataatgaacaagaataataaattaatgaaaccgtattatcatcggaataagaaaatatattttctttcaaccgtatttctggtggtatgttctttcaatgtttacgcagctgttgaatgtgtttctggatgtaatgttgctgttaattttgatattaataaaaatcttactgaaagccagaacgtgattggtgaaagtatccccagtggccaggttgatactgtggagcctcgtcttcgggcgacaagtcaggctaaagcacaacactggtttgtatatacaggggatagtatccctgaaaatggaaccagtttttcaaactggcaatataaaatagttgatgactatatttctatgggcgtaatgcttgatactccatgttatggcgttgtttatgcgccttttaacagagttatcagaagtggtaagtgcgaagaaattacttttaacgttggggatgaaaatgtaataacaaatagcccttcctttaaaacacaggtttatatcagaaagaaaattgttactggtgtttacagtaagcaaattcatataggcgattatggagcatgtcagccgataggctgtaccagtcgacaagccattgtatatcgattatatgtaagcctgaatctcactgttcctcaatcatgtgagatagatagcgggcaatcgataaacataaactttggcaatataccatcgaccgcctttaaacgggcaggcgaaattgcacaaggtattcaacctcaatcaaaaaccattaatgtaaaatgtaacaatattgcaggtaatgcaaagttaacaatgagacttcaggcagacaagcctagtgggaatgcagttgtttcagatgaaaaccctgatgtcggatttcatgtgaccaataccaatggagatccattaacgcctaacaagatatccagcgtaattcccttcattcttgatagtaacgcacaacagaatgttaccatccgggtatatcctgtcagcataacaggaaacaaacctgatgagggacctgtaacgtcaagagcatatttgcgtgtggattttccgtgatgaatggagcatattcaatgatgtctgtttatttaatgatgcgcgatttttgtcagaaaagagctgggttgattttttttggtatgcttttcatgactacagatgtgtttactcaatccagggctgatttaggggtaactaacttgtatatgagagcaacattgatacatccagcctgtgttttaagcactgattcgataaataaaaccgtaagtttaggtgtctggtctgccagacaatttgaacaaacgccgtctgcattaccaatgacacgatttacaattaatcttgagaattgtggcccaacacctgccgtaaaagtaagctggacgggaaaagctgatattataaatagtaaattgttttctctgactgaagacagtacagcaaagaatgttgctgtcgaactgcttgactggaaccggaatcgtattcctccaggttacacgacgccatattattcatttgagatgaatgcctcagctgtatctatccctttttacgtacgttacgtcaggacaggtaataatgttacagcgggcactgctaattcactggcaactttcacgctggattacttgtaatttcagttcaaagtacacagtttcggcaacaggaaccacaggaaaaatattataacaacgatacgagattgatggtttctgtaaacaattatggctctgacaacaaacaatcagtacaaataacatacaggcatgcttttacctgataatgttcctgattacagtatattaacttccattattcattcagaagcgataaaaatattcgcgtaattttatgctttttttgaaagcttaaagtgctttgaacaaaagctagtgttaatcagcataaaaaacaatctttgcaatgagtgaatttcaatcatacggtttacaactgaacaaaaaaaaactttgtgttttttattgttcagtttgtattcaaaattagaaaactctgcaatgatgaatataaatattaagtatttcattaaagatgaagcaaaactctttaaactgctcagaaaacagggggatccttttaataaaatatatgttatttttcattaaagttatgtaaattccttaattggcttttttttgtgatctctatagtaaaacaaacaacaagtagtaatatgaaggcgtttaattattatagagtatttaaaaaagtttgccttgatgtacaaaataagtaaggacaatacatatgaaacgaaagtacttaacttctgatgaggtttataagctactggattatatttataaaaatagacataatcatcgggactattgtatggtaagtatggcatttatacatggcttaagagtaagtgaactgatagagttaaaattaacagattatgaaagcatatccaggaaaatttatatacatcgtttaaaaggggggctaagcacaactcatccattactggattttgaaagtaaagctcttgaaatgtggctgaatgaaagacgctacttaaaaggaaaccggactccctggatgtttttatcaaggcatggaggaagactttccaggcaacgattttatcagttgcttaaaaattatggtgaaaaagcacaactctctttatcgattcaccctcatatgttaagacatgcatgtggctataacctggctgaactgggaaatgatacaagattaattcaggattatcttggtcacagaagcattcgtcatactgttctttatacagctgcaaatgctgaaagatttaacagggcatgggtcaaagacgggaatttcatttgcccggatacagaacaaaaataatatcttatattatttgctgtcattatacacagattgctcttacagataatttatctaacccgagagttaccggttttgatatgaaagtagaaactcatacgaaatacgcgataactctccagcgcatgcgaataattcctctgtaaaccacaattttgatttatagaatctgaatcagcccgttaacttttaagataattattgatctgcttgcattaaatttctgaattttgctaaaaatgtattcataactattaagatttgatggtaaatttctgaaaacgatgtactacacattatgagagtgctggagaaagattcatactgtttatttttgtgatagttttatttagctcagtgattttaacaggctcagaaaaaaaatatccctgaaataagctgacaccttcggcagatagttttttatacagttcttctgattccacaccttcagcaatacatatgctttcattgcttacacaaaaagcaatggttttttttattttagatatggccttaaagtcaaataaagcattcctgaccagtgacatatcgagtttatatccattaaaactaacgccactctcaataaattcacagttactctcagaaaaacaatcgtccagatatacgtttataccctgtgagtttagagttatgatgttcttttcaacatttccccctgcgcgaacctcagtatactcagagaattcagcaaccaaacatccaacccattttggatttttaagttttactatagcgacattgaatatctcctgtaatgaagaggattcagctaaagttgctggaatattaactgtaaaccagaactttccattaaatttattaatagcattgatggcttcatgaataacaaattcagtcagcatgacccattcttcccgactatgtatctcttgaaaaaacatcgatggcaacatcacctgtccatttttgtgccagcgtataagaatctcaaatcctgcaacctggccatcggacataacgacaggttgaaatacggaaaataactcattcttgagaagagcttccagtaacacgaattgtttcagttcactaatatacttgttttcatttctgattaagtcacggtgcttgtctggtaacagtgtggctgtgtctggaaattgagatgagagtttttttaatccgctaagtttttgactgtatattgtctttatgcttaaacaatattgcctggccagaattttagttttaactcccatgaacgattttaacagaaccaccagttcccgtgagtttaatccttccttaaaaaatggtgaagggcttactatcgaaaagcggggaaaaaaatcagtattgattttaaatgatttgccatcctttataaggatcgaattaggcatggcaattctggcccgattaagccattttttatttgatatgtttttttttagtgttacatatagccaggtaggagacagacggctaaaaaaaataatcctcgccgggtgttttagcgcagatgttagcgatgataaataatttatagttagtattgcctgtaatgactccccagggataaaaacaatcaaacgatcaccagacttaatgttatttgctacgtcacatgacaattcaaccatcttgacagatggcatcagaataacattttttttaccaaagtttgttaacatgacagagaaagcgttggcagcaaactgacagggggagattatatagtaaactggcgtgagatcgcacgggcaaacagtaagagatctattctcttcatcgttaatcatagcaatatatccttagcagaaaagataaagcatatcaatttaatcacatcattctatgcactttgtgcctttattttttatgacctttttcaggcacgcgtgttaaggctaactttattttatatactccattgctcttataaaaataaccaacgtgcagtttcgaattaacaaaaaataactttattttaataactgcagatttatcacggttagtaacttttacactttagtttgtgttagtcatgcattgcatgttttttgtacttacaatcggatataattatttcaatcaacaagtgtccttcataataagtgttctgatattgttaaataattaatcagacttctttttagtcggcttatcagaaaacacattaactcatttgtatattctcctgcttttcagagccctgatatgcgccattacagtcatcaattttccctggtgaagcgagttaaatcacagtattccctcacagattcttgccttccctacagaaatgctgtttttttagccaaaaaaaacttaacattatggcccattttgacaactagttaagaaacaacacaaataccctgttcatcactctgattgcagggtatttatcttcttttcaggaaaaaattgagatattatcatgtttatttttctgttttattaacttgtcagttctttgacaaataccaaaacatgaatatgagtagtgagagtctttttaagcaacattccacccggagaaatgtgtttttttttctttaaaaacaatagattgatgaaaagtaaaaaaatagattgctttttttataatatataaatatattcgtttaacagtttgggccaaattgtcttgctcgcgattttattttaggctgccacactccttcaaatctctctgcattactggctgtgtaatgaacagtatgtctgatgttcctgtgccccagataatcctgaattaatcgggtatcgaccccacgatcagcaagtgcgaaaccacacgcgtgacgcaacatatgcggatgaggagttacagggataccggccaaagagcctaagtgacttataatctggtatattctctggcgtgttaactgagagccgtgccttgacagaaacaaccagtcactttctgcacctttcttcgactctctgatttttagccatctctttatggctttaatctcatcaattaacaatggatgtatagtactaaaaccacttttcatcctcctgatatataaacactttccttgtaaatccatatctgaaagtctcaggttacaggcctcactaaccctgaggccatgaatgaaagacatatataagaagcaataatctctttcagaattagaagtattctttgcacaattcagcaggcgttcaacctctgattgtgtcagatgctttcttttggtcatttttcctcccattttgaaaactaaattcccagtaaaaataaactgatttcagcaatgacatccgctatgtattttctgggcaagaaacaggctacaaataatgtgtacagacagatacaccagaaaaaccacctctaacactatatagaaagtcaatataacttttattcagtattttatactaacggaaagttatattaatgaacattcattatttgcatggtggctatgctgtgtacataagattgtgctgaaaagtcattagcacattcttattttattattagcttttttccataattgtcattactccataaggagtaatgggtgttaaaaaacacatttacttgttaattaatgattgtttttattgacggggaataccaacagttgtttacattttatcatgttgcagcttttcctttatacttcaggtaatactcttttgattttattgataatatatactcacacatgctcattggcagcgtgtgctgataaataaccactaatctctcaggatgatatttctgtgataataatataatggccctgtaattcagcaaaacactaccttgcagacctcgttctgtatcattctgtgtaatatattttaagttaaggtgaattatttagtgatattactcatgatattcacttttgctcctgtggagtccggagctttaatgacaacatccgtgatgagcagcgcagatatattgagtaaattaatacttaatctattgggaagaaaagtgagtctgtacccgttgctttctggattaacagaccgaaggcctcagaataaataatctattgattattaataatatattaaatatttttcacattatgagtgattataatatcgttactcttcgtcctgaactcaggcaatatatgttcgaattacccgcagaacagcatatggtttattttcatcaacctggtagccatattatcgtccgtatattaagcccgcatcaggatgctggtcgtcgtgtcaactgacattaacctttgctttgcatgtaacgctacgtaaaaactgacagagtcagaggagaagagcaggcaagaattcacgtagcgtaactcccctctctgtgtattcttctcctttccttgcgatcatctttgccctggcattaccccatttctcccaaaaacggcaaaccagccctcagcccgcgccacgactggcttaatacgggatccctgctgcaaaacgtacctttacgtatttggttttacccgcaataatgcgtgataagcaaacaaaaggatccgcgcgctgcgatttattgtcgtggaaggatccgggcgttcaggtcagaatacctgtatccataaacagtgcgtgtgctacgtgaaaaataactcatgaacaatgtcattcccctgcagaattcaccagaacgcgtctccctgttacccattgcgccgggggtggattttgcaacagcgctctccctgagaagaatggccacttccacaggggccacaccggcctacctgctggccccggaagtgagtgcccttcttttctatatgccggatcagcgtcaccatatgctgttcgccaccctctggaataccggaatgcgtattggcgaagcccggatgctgacgccggaatcatttgacctggatggagtaagaccgtttgtgcggatcctgtccgaaaaagtgcgtgcgcgacgcgggcgccctccaaaagatgaagtccgcctggtcccgctgacggatataagctatgtcaggcagatggagagctggatgatcaccacccggccccggcgccgtgcaccgttatgggctgtgacggatgaaacgatgcggaactggctgaaacaggcagtgaagcgggccgaagctgacggggtgcacttttcgattccggtcacaccacataccttccggcacagctatatcatgcacatgctctatcaccgccagccccggaaagtcatccaggcactggctggtcacagggatccacgttcgatggaggtttataccagagtgtttgcactggatatggctgccacgctggcagtgcctttcacaggtgacgggcgggatgctgcggagatcctgcgtacactgcctcccctgaagtaacggcacttccttatataagcagtggtcagcagaacagacataacataagctggagcaggtagataagctgtagtgagtaaaccatgttttatgaagggagcaatgcctcagcatcaggttacggggtgactcacgtaagggacaggcagatggcagctcagccacaggcagcactgcaggaaactgaatataaactgcagtgagcagaccactcactgcacctgataatataagctgtagtcagtaaaggagcactcttcactgactacagtttatgttcagcgggatttgaagagtttttccaggtcatccagcgtgatgcccagtttctcaagcagggcaagtttctccgccatctccggactgactttttccgcaggtgaaggtggcaacggattttccttactctcatcattcggtgcttttaaccggggacgccggtagtgaatacagaagagttttgtccgcccccgctggatctccgtgtaatcaagatatccaatctcgcgcagctgctccattgcccgtctgaccgtctggttctgggaaaatacaggagacttcagattgaggcgtgcacgcagccgcgccagcgatatcggtgccggatcccggggcaggctctctataaaggtgtagagtgcctgggcggactcccgtcgcttcagggcattaatcgccttaagctggagaaggacttttctgtcaaactggtacagttcaaacaggcggggatcggcctgtaactgaacaatatcccgctcagtatcgtagtaggctgactgtaccagatgggtgatgtattcccgggtgtgcttctcatcggtacgggaaaacgagatcacggtaccggcaatgcgcttcagggaagggctgatgcgctcacgcagcctgcgggatgactggcttgaaggtataccacacagttttgcaaactcaacaaaaggcagttcaactttgtcaccagtcacgttatggcgggcaaaggaatgaatgatccccacccaggtcttgaaatcgttatccatatccaggcgggggccggtgatctcaaccttatcgaatccctcagcacgggccagggaaagacgtgtcagctcttccgtggcatcagtacgtgacagtgtattttttttactgttcttcagcgatttaagggtcggtacaaagacgcccagacgcatcagcgccacaggttgtacggtgttgttattgtttggtgtcagtgtcaccagctcaccggacgacttatccacctcgccgaacagttttttgatgtctgaattttcgttttccagaaagcctcctgcctgtggacagtaaaagaataaacagcaaatcgtgtgtcagaaccccgctaactgactgaagaaaaacctgcagcctgtatttaacaactgagtctggcgtactgaccatagtttatgtcattaacttacttcagtatatgcattactgaatacagcttatcatgaacctgttacagtttatccataacatgccacagcttatgtgaacatggtcccggcccatgagtgacaaggtttgcagcgatatggggatctttaatggatcctttgttgatcattcatggatctggtttattggatcgggcctctggatatgtggataaatcattccagaaggacagcgcacacaaccgtgttatgaaagggcttcagggcgtacctgctcactgtaactacagatacattgcgcttcctcgccggttcgcgggcttcgcccggtcaccggtctgcggcgagcactgttttttctgatgtctgtctttacaggtaatttttgacggaatctgccgtacttcctgagcgcacggtcatatccgaagtacacttcatatgtgtgtttcaatgccagggattgtgtattgtagtggatcacaaaatcaggacaccgggataacctgtttccacttttcttaatgtaagcaaggcgataaaccatcgttgttcgtgtgaggtcgataaacgttgtaataaccattaatccacaggtttctatcgcgtaccgcatggctaaaatcaccataaccacctttcggaagccattcacttttaaggctgcgaaagactcttgccatcggcgaattatccaggcaattccctctgcgactcatactttgcattaccccataacgccagagtaactttctgtatttattgcttttatctcattctttcgctggcaagattataaacgtcactgcgctcacgtttacccacagctacaacagcgataattaattgttcgtcaatcacctgatagaccaggcgaaaacctgacgcacgtaattttattttgtagcagtcctttatcccgcgcagttttgcggaaggaatatgcggattgtcacagcacttttttagctttttcgcaaactgttgctgaatagtcttgtccagtttttgccactctttaagcgcatcttccctgaattttacctgatacctcataggtatttatccaggtctacatcatgcagcggttggttgctgcgttcggctaccagtttaaccaactcctgatcgtctagggcatcaagcatcttttcgtacagctctgcgggtacacagtagaaagcaggctgattacgattcaggatagcgaccgggaaaccatcaccggcgctgactgtcgccatcgggtttttcttcagctcgctgacactggcgcttgtatcactgagaataatgttaggcataggccacctttcaagactgtttaaccagtctcaaagatactccttacataacctgttaacaagtcttttgttgttttttgtacagatggacagaatcacctgaacgtccattctggcatggcatcaatgaatgtccgttctatgccagaggtgggcgtcacccacccgtatcctaatatggcactctaacgcgcccaacggtcttgtctaacccctagcctgctcagagacaatgtctaactatgctgtttgatgtgaatggtgacttgcaatgtacaataatttaatgctaatgcaaaatatattgtacgtttttcatatttatgtacaatgtgattgaactttgtacgcaatatatgggcagggaatctatctcagaggaaaactatgaaacgagattacggtagtgttggtaccatagcgctcagagcaagtgctttacttcaggccatgagtcgggatattgaggagcaaagaaaagaattcaatctgacagagtatcatcaaacatatactcgtaatgcggtcgcaaaattgccgaagctgagccgacgcatcgtagaactggccgttaaagaaatggaagaaagtggctatgaatttaataaaaagcgggtaggcaacgtcgagcaatatgcattaacaattcagaacgttattgatatttacgctcaccgacagataccaaaatatcgcgatgttcataaagaaccttacgtaatttttgtcgtcaacttgaaaggtggggtttcaaaaaccgtcagcacagtaacgctggcgcatgcactacgagtacatccggatttgctgcgtcatgaccttcgtatccttgtgatcgaccttgacccgcaggcgtccagcactatgtttttggaccatacccatagtattggtactgtccttgaaactgccgcccaggcaatgctaaataatctcgatgctgaaacactgcgagaagcggttatccgacccactatgattcctggcgttgatgtcatccctgcttctattgatgacggcttcgtagcaagccaatgggagtctttggttgctgaacaccttcctggttttaagccttctgaagtactcaggaaaaccatcattgaccgtatcgctgatgattatgattttatctttattgatactggccctcatcttgatccatttcttctcaatggcttggctgcgagtgatttacttctcacccctactcccccggcgcaagttgatttccattcaactctcaaatatttgactcgtttacctgaaatgctagaacgtttggaagaagaaggcgttgagccccgcctgagtgcgagcatagggtttatgtccaaaatgaccagtaagcgcgatcacgaaacttcccatagcctggctcgtgaagtgtatgcgagtaatattcttgactcatcgcttccgagactggacgggttcgaacgatgtggtgaatcttttgacactatcatcagtgctaaccctgtttcgtatccaggaagtgcagaggcattgaaaaaagctcgtaccgaagcggaacgatttactaaagccgtttttgaccgcattgaatacattcggggagcatccaaatgaaaaaggttttagctcgagggcgagttctcggcaatagcaattcagagttcgctcgcatgcttgaaggtgacggagagatcaaaacgtttactcttaagtctgggaaacaagcaaaattcattaaaacggttgtattaagcggagatatagaatctaaaacgttcgttgatgcatctgttaatggacgtgatcagactatgctttcgcgtgagtcagttagtgacataactcgcacgattaaaggtcatcgggcattatctgaacataaaacactatcagtaagttggagtcattacctcctcccgaactcaaagctatcatacagataattactggttaaccctatatagggcattttaaagtgttgtgatcttacccagcaatagtggacacgcggctaagtgagtaaactctcagtcagaggtgactcacaagacaaaacagtttcaaccagtaaaaaaacgtaaacaccattcgcatgaatttcgtagttaagatctgaagcttgcagaatgcatcggtgttactgccggagtccgtgaacttagtctgcatgaatcaccacagctttacatctgtcgcagtaaacagcaaaatcagcaaacttacttaattatatcgagtgcgattacaatcgctggcgatggtacagttggtgtggcggtctcagtccggaacaatttgaaaatcagaatctcacttaaaacggcatccattttacaaaagatggccgtctgtgtatttgtaatgaataccttctacatgtttagagtgcataatccacgacaaggcgatatcctaaaaattagctagcaggcaactttgatggcatagataatgtttttagtaaaaaagagttgactgaatataatacagcctcttcctacataagaaggaatgtgctcacaaaaaaaaaccattagtctgcttcctgttcttacaataatcagtattatgtattttatttatatagcaaaatatgcttgttacacctgtcataattaggcatggtaaaattattgattgaaccctgggggagaaagatgcacagtgattattataatatggtttttggtgaaaaattggccaatattttatatgaagctaactctcaatttttttacgagagaaatgtcatagaagaggcagtcaacgctttattctgtgagcgtgaaataataaacaacaagaacataataaagaagctgatgttctttttgtcagatgttaatcacaccaagaaagatgttgttcagagcgcacttaatattatcattgacattacatcaggtgatatttgagattttacataaaagataatctttcaaggagtcttatctgaaaacgaaatatatagtccctctcgttttgtaatatcgattggctttgttgaatcggttacgtaccccggagccggtcatattttcaggtaatacacacgctttcagacatttcggctttcgtcattttggtatcatgggcatagcttctgctacctgaccatcataatcacgcagcttcagtgaagcagtgaccacctgtttaacccggtgtatcgttatgatcttatccagcaattgaaccgccccgggtttcctggagagtgttttatctgtgaactcaggctgccagatcatcgtttccgatggaagcataataagctttttctgcttctgccggtgggatatggccctgcctttccagcaatcgtcgattgttataccagtccacccacgtgagtgtggtcagctcatcatactgacacgtgcattacccctaccgcgataatgcaaccgtacaatatagggcgtttcctaaacgcagccctcatcactccaatccaacaagacacagcatttttgatcacgaagaaagacaaataatttccgtaaatgtttccgttgttacaaataacaacagtgttttacatttctttggcctcaggcccgcgcatgttgccattcgatgtcattttcctgactcgtttcttctttatggtgtagtgtgatcttcactttatggatgctaacaatatgaaaagaaaaattattcccgtgctaatcggttgtacgctctctttctctgccctggcggcacaacctacggctgagcgctatgtcgtcagttttccagaaggcacgcacgtgaactacgccggcgcatttgccagtgcattcccgaacggccttccggttgggataggttctggcctgctgttcaccggtaaacagggcgatgccctgacattcgcaaccattaccgatcgcggtccgaacgcggattcaccgaaagaggggaaaaacgaaactaaaattttcgttacgccagatttcgcgccgctgctgatgacgattcgtgtacaaaacggcaaagcggaggccatcgatccccgtcctctgcatgacgataaaggcgcgatcaacggtctgccgctggcaagcgacgtgattggctccaccaatgaagtggccttcagcgacacgttacatagactgaagggggataatcgcgggctggatacggaagggatcactccggatggtaaaggaggttactggctgtgcgatgagtatggcccgttcctgattaacatcgacagtaaagggaaaatcctggcaatccacggtccgcaggcggcggaaggggaaaaagcgattgcgggcggtttgccaaatatcctcaaatggcgtcaggcgaaccgcggctttgaaggcctcacccgtatgccggacgggcgtattattgtcgccgtgcaaagtacgctggatatcgacgctaagagcaagaaaaaggcgctgtttacgcgtctggtgagcttcgatccggcaagcggaaaaaccgcgatgtacggttatcctatcgacagcgcggcctacagcaaaaacagcgacgctaaaatcggagacatcgtggcgctcgataaccagcacatcctgctgatcgaacagggaagagataaaaacaacagaatgcgtaacctgatttacgaggtcgatctcaataaggcgagcgacctgtcaggcttcgacaagccgggtgagtatccggagtttgatgatgagaaaaccctgtcacagcgcggcattacccttgcgcagaaaacgcaggttgttgatctgcgctccttgggctggcagcaggagaaggctgaagggttggcgctgatcgacagcaaaacgctggcggtggcgaacgataacgactttggcgtgaaggtggcgatgcaacatccggtcgagggcaagacattcaaggattatcgggtgaacgcggaaggaaagctgacgcttgacgacaagcaggttgaaacgaccctcagagtgaagccactggagaaaccggagtctgacagtgaactgtggattgtgacgctgccggaagcgttgaaataagtttataaggtacggacagcagtatcgcttagtttttcaaattcatgtatgtgaacaatattggggttccggcgtagacccccaatgaaagcgtcaccacgtgaaaacatgcctgcacggtttacacgtcatcccatggtggcagccggttaactttcctgcgccaccagtggaaaaaggccataagcagtccgaacaaaagtaagcgtacagcgagggccgtattgacggggatgtgttattcagctggcagtgctatgcgccacggaagcagttcgctgacccggttgaccggccagtctgctatgacgccaagcacatggcgaaggtagctttctggatccacgtcattcagtttgcacgtcccgatcaggctgtacagtagcgctccccgctcaccaccatggccagagccgaagaacagggtcttcatcttttcacgcaaccagctttccagggatttcaacagcggtttcgtttttcgctgacgttcagcaagccgctgctctgccggcattccccttatatccgcctctatggcgtacaactgaccgatctgctccagggcttcttccgtcagtgctgacgggatgcggacgtgcacatcgtggatctttcggcgggcatgagcccagcaggcagcttccgttatcggtgccgttggaaatgacaaacagttgcagatacttaaacagagaattttcgctgttaaaactctctttgctgtaacgatgtatctggttaaaggcctcacgaatcgccacgccgcgctttttcagttcgatttgcaccagtggcaagccattaaccaggatcgtgacgtcataacggttagcatgagaacccgcctgttcaaactgctggataatctgcaccttattgcgcatgagattctttttatctatcaaatagatgttctcaaggcgttcgtcatcaaaaataaagtcgcaaatatagtcgatatggattttacgggtcttatccagaatgccatcgctcgggttatccagatactgctccgtgaaacgccgccactcactgtcattaaataccacaccattgaggttctgaagctgttgtcgaacattggccagcatcgccgactgagattttacggatataaattcatagccctgatttcgcaggtcctgaatcagttcccgttccaggtccgattcgctctgatagctgtcgcctgtttgctcagctttgatgtacttatcaagaacgataaagttattggattcagcaatggtgtgtgtctgatgagtcatagcgcatcctttgtgccgtctggcaagggccggaagggagttaagggtgacttccggcacgtaaaaaatagtctatatacagaccggatgttaaggtggtccggtcggtagcaacggtcaattaattactgacagtttcaggtttcgggaaactgaacagtaaatcacgatagtactcgtattgtttctggcgcaactcgatttcacgcgggagaccttcggtgatggagttagtcagggtgtcgaatttatccagaatccgaacgatttcagactggatggcaagggatttttccggattatccgggcaggggactggtacaggtatattttcaacctgatgactcattaacttggggtttcccattcctgagtaaacatgttttttggcttctattgttagccagtaaaacagaaatttgtagattaatgggtatttattttttaatgtaatcaggccgcaaacattagttattgaaaatttacctgttcgatagaacacagtgcctgcatttgcgccatctgttgtccagcttatatattcgccatcaaaatcgaaggtattgatagaacctattttcccattatttgcagtttgagagctatagacaggatatgggccaaaattttcagttaaatatccctttgacataactctgcctcttcttaaggctgagacttcccccaatggcaaccactcaacctcaaccccatccagcaatttttccagataaataggtttttcctgctcatcatcaaaactcaacaactggtcacgatagtagttgtattgttttttacgcatattaagctcagcggtaagctcagcggtaagtgcagtaaacttatccagaatccgaacgatttcagactggatggcaagggatttttccggattatccgggcaggggcgagggattaaaaattttttgaatccatccatatcaacagacgcaaaactggacatcgttgtgttttttcggcaccactcagctaaagaaaaacagtagtaaaataaaaatttaatatcaaagcaatcagcataagactcttttaaagccaaacatgtaaacctttgattggctagatgaggtacagtgattaaagcatgctcaccaattgttgccgacgttgatattaatattgaattttcaggaaatagtttccccccttttacggcgcaggatgaaattttttgaagtgaattccctagaattctaccattttcacgtatgtcatccattctgaaccaaggtatatcaccattcgcccaaaattcttttttagttttagacggtgtataaccattccttaagttgaatacttttgagagtggcaaccactcaacctcaaccccatccatcaatttttccagataactcaactcgctcatttctgcacctcgcagccttcaatttcagccacaattgcatcaatatctttacgcaactggtcgattttgctgaccgtggttttcagctctgcattcagttcagcaatattgataatttcgcggttatctttcgcttccacatagctgctcaccgacaggttatagtcattcgcgacaacggcttcgaacgcgacagattttgccagatgagcaacatcttccttgctggcaaatacctgcataatctgttcgatatgggcatcggtcaggatattgttgttggtctcttttttgaacagttcgctggcatcaataaactgaacgttggtatccgttttatgtttggacagaaccagaatgtttacggcaatggtggtgccaaagaacaggttcggagccagtgaaattacggtttcgacatagttattatcgaccagatactgacggattttctgctctgcgccgccacggtaaaaaatacccgggaagcagacaatcgcagcacgacctttggccgaaagatagttcagcgcatgtaatacaaacgcaaagtcagctttggatttgggggccagaacgccagccggggcaaaacgctcatcgttaatcagcgtcgggtcatcgctgccaatccatttcaccgaatacggcgggttagaaacgatggcatcaaacggtttttcatctctgaagtgcggctcagtcagcgtattgcccagcttgatatcaaacttgtcgtagttgatgttgtgcaaaaacatgttcatacgcgccaggttataggtcgtatggttgatttcctgaccaaaaaaaccttcttcgatgatgtggtcatcaaactgctttttagcctgcaataacagagaaccggaacctgctgccgggtcgtagattttgttaacgtgggtctgcccgtgcatagccagttgtgcaatcagcttagagacgtgctgcggtgtaaagaactcgccgcctgacttaccggcattcgcggcatagttagaaatcaggaactcataggcatcgccgaacaggtcaatctgatgttcgttaaagtcgccaagctttaacccttcaacccctttcagaaccgcggccaggcgggcatttttatccttaacggtgttacccaggcggttactggtggtatcgaaatcagcaaacaaacctttgatgtctgcttctgaaggataaccgtaagcagaactttcgatagcaacgaagatgctgtttaaatctgcgttcagtctgtcattggtatttgctttcgcagctacgttgcagaaaagctgacttgggtagatgaagtagcctttggttttgatggcatcgtctttaatgtcatcagtaattacgctgtcatccagtttcgcataacagatgctgtcatcaccggcttcaatatagctggaaaaattttcgctgataaaacggtagaaaagcgcgcccagaacgtattgcttaaaatcccatccatcgaccgaacctctgacatcgttagcaatttgccagatttggcgatgaagctccgcgcgctgctgaagactggtcgttttttatcctttgaatgtgtttttaacgtcggcttttgccgggattttaccggaagttgtttggtttttcagatttgtatgacggtgaggaggggattcaacaccagattgttagtgcatcttattcagcatcaccgcttgcgtcaggaggctactttatatgcccatcgtccatccgtaggtgatcagataatttattgcgagtcaccttcccgattttcaatctcattatttacccaatctttcactagtggataatccgtcagctactaacggcgagtgtatttttttacggacaaaagattatgcaaacagaagctgaagtcctaaccgatcataacgagataatttgctcgaccaatattgagcgtatcgtcacaggacgtgatagtgcactgaagcagatagcgacgttaatccaaaaacttgatgatatctccagcctgacatccagtattggcggtgatgtggctggaacctggggaatgcgtaatggatatgcctttgattgctggctgatgcagccaaccgacaaagcgatgccggtgatcacccgaaatatcgatcgcagtatctggcgcgatctcatgctgaagtccgggatgttgactctgatggatgccgaagcccgcagtcagtgggcaaagaacctagaggagggcgagctcccggcgattagcgaagccaacatcctgagtacttttgagcagttgcaccataacaagcaggacgttttcgaacgtgggattatcaatgtatttaagggattgagctgggactacaaaaccaataatccctgttatttcggtaagaagattatcgttaacaatctggtgaagcatgacagatggggctacagcctgtactggggctggcggcgagatcagcttgccgatctggaacggatgttctacctgctggatgggaagaccattcccgataaccggcatgatgtctccatccggtttatggattttgtgcgcgataatccgcatcagcagattttcgaagatgagttgttcactattcgctactttcagaaaggcagtggacacatcacattcaagcgactggatctggtggataagatgaatgacattgtggcgaagcactatccgtcagcgttatcagcaaaatgaatgtcgtatgtttgctgtcaataatgtcgttactggaaccctctgaatttcggcatatccatttactggaaacgatgtttacctaaaaacagttgattccatatgcaactagaaacctcacacaggttgaaaaacgagtagcgattttacgtatgaaagaatgctatagccttctctgagagccatcaacatcatgcgttttgcagttaagtcatcagataaatgtggtggctccagggcagaaggtaatttcaggatgaaagttatttttttatcacaaaatttaacatttttgagattaatccgataagataaggctatcccaatttccctcccccctacatattggattaagagatggttcaggattcatcagcattagcccccttctttcgtgctcaaattgaaaaaaataatcaatacaattcagtttggggcaaacactaccgccagcttgtagaacagattcaggccgaaaaaccaaacttttctgaagccacgattcggcaggtatggtatgaacgtgacaatggtgtctccagcctgatgcaaggagggatgtcattggttgaatttgaaaatgcacaaaaagaccttctaacgctcacccgtcagatagcagaagagtgtacacaagaaaattataatcgggtcattgaacgccttatcaaacttaaagcggacggagtattaaataaggtatatagggctctttgtaatcgtgcttttgcagcaatatacccatcaaaaattagcagtgtcgtgaatgttaataatttttttagttgctacaattattgcaacaaccatttccagctaggtctttccggagaacgggagtggctggctcgcaatgttgatcttaaagaaacgctaaatcgtgcgctgggtgatgatatcgaccctattgagctgaatatgtcactttggcatctctatgcgtatgaaattcaggataaaaatgctatcggtttagttggaagcgaaagtgctttacaagaaaatgagcaagaagatgatgttataagttcgccattgcctaaaaacacaattctctatggcccgccaggtacaggtaaaacatatcgtactattgagattgctgtacaaatttgtgatccgatcgcttactccctgcaggagggtaaggatgagagtgaaaaacgtcgcgagttgaaaaagatttatgatcagcttatcaaagataatcgagtgcgttttatcacctttcatcagagctttggttatgaagagtttattgaaggtttaagagctgagactactgatgacggtaatgtaaaatacgaaataaaggcaggtatttttaaacagatatgcgaggatgccgcctttggtcatgctggtgcgcaggaaatgttggatagcgcacttactcacctacaagaacgtttatctgaaggtgaaaatatcacgctggaaacacaacagggtaaggccttccagctgacgtataaaagtcaaaccaactttggaattttcccgtcacaatcgaaaaaagaggatttaggacagggttacaatgcctatttgaaggatattcggcaagtttatcaggatccacgagcaaaagtacataatccatcttatgtacgcagtatccttaactatttaattaatcaacgttatctgcctctgaatactcagagcgtagcttcagaaaaaaaggaaaactatgttctcattattgatgaaataaatcggggtaatatttcaaaaatttttggtgaactaattacccttattgagccatctaaacgggctggtgagccagaatcgcttagcgtattgctgccatactcttccactccatttagtgtaccgaataacctttatttaattggtaccatgaacactgctgatcattcgcttactgcacttgatactgcactacgtcgcagatttgattttgaagcgatgctgccagatattactgttctgaaagatactgtcattaaaggtattgatctgcctcgtctattgcagacgcttaacgatcgcatccaggttttatacgatagagaacatatgctggggcatgctttttttatccctgttgtgcaggcaaaagaagacgaagctctggcatttgaaagattcaaacggattatgcgaaataagatactaccattgctggaagaatatttttacaatgactggcaaaaaattcgcatggtactggctgataaccaaaaagaggaagcaccagatcttcaatttgtacgtgaggtgaaataccagaaaaagtatgccgatctctttggtgataacggaacagatgacttgggaaccagttttcacctggcagcagaggatgacaacgtttgggacaatccaatcgcctggcagcaaatttatgcacctcaaaaagaaaaacgcaggagtgcggaatgaaatcttccagtcatttcactgtgttcgaatacgggcatttagtgagtgaggaaggtgatgcccgtataaataatgcggtagtgctacctgcagacctatttaaatggcttgagctgcgctgtctgaaagacgatgctgataatactcatcgtttgctcacccttagcagccggaatggagtaaaaacgctgcaggtaaaaaactatgcaggagtaatctcactgccaggggggcgatttctcgaaatcctgcctaaaacaggacaggataatgaggatactgttcgtcaacaattactgatgatgttacgtacgttaaaatcatttcgtcatattgcctcctctgaatctggcgtcaaaatatctaaaatgcctctgatggatatctttattcaacaatttatagagagcgtgcgtaagattgtgcagagagggttaaaacgtgactatttacgtcaggaagataatcttccatggatgaaaggaagattacggatctctgcacaattaagcaaaaactgtattaggcgggatcgttttcaggtggagtatgacgagtacagcgtcaatcgtctggaaaaccggatactcaaaactgcaatcaataagattagtcgccagaccagtaatccacaattattacagcagataacacagctgcagtttcactttgaaaatatcacgtcagttcatgatgcttatatagctttcgagcagttacactttgatagacacatgcatcactatgagcaagcattagcgtgggcgaagatgattttattgggcgattctccacactgtatgtatggggatgtttatgctttttcactgcttttcccgatggaggctgtttttgaatcttttgtgacgacatggatgcgttatcgttattatgataaatggcgagtggacgcacaggtaagttcaaaaaatttgattagttataacggtaaagctttatttaagctgcggcctgatatttgtttacggcctcgtaaaagtactactggttcagttattacctgtgatgttaaatggaagatagtaaatggcagaaaggacagtcttgaacaatctcaagccgatctctaccaaatgcttgcctatggattgaattaccaggagggggaaggtgatatgattttgatatacccctatcataacggatttaatcagccatctcctcatccttatgaatttagccatcagaaggaaaataggttacgtttatgggttgtacctttctttattggcgagagtttacagacatcagagttgcgttttcctagtggggctgaatttatttagtatttgtaggctatctctttatacaatttatttgtctatttatatgcacaagatagcctacctcaccccctaaaaacctcattccgatgccactctacaaacacctcataagggtaatttttacgcacctgcggcaacgcaatagttttcccgtcaaaatcccagaataatctctcaacgatccctccgccgtttaccgcatctgataccagtacccgcatattttcatccaggccaatcgatcctttatcaaaggctttatggtgaattgcgcaaagcgccaggccattaggaatttcacaaggaccgccgtgctgtttccattttatatgcgccgcttccagcgcgacggtggtgtcatcgtggcgcatattaaagccacatattgcgcactggtagttataagcgcgtaatacatttttgcgaaataacgggtcgcgctgtttacggatttgctggagatcaaaacccagctcgtcagcgatttcttcctgaatactctcggtgaagtgcgcttcgagtatctgttgcgccagagtattgatgagttttttattgccggttaccagggcgtagtgctgttcatcgaaaccgcctgcaacgtggtattcgttcagttccttcactggcggttgtcggctgctccctgctgttgagcaacgctcggcattgtgtaattgccagaatccgtcgccttgtaatcgccagaacggcatatcaggtcggtactgtgaacgctgtggcccaaaacgttccagtaaactgtgcagaggttcgtagatttccgagccataatcgaaaaggcgcggatgtccatgcaggtatcccgctaatacgtatagcaataacaatggcttatgcggcgcgcgctgttcacccttgtgccagatttttatattggcaattgcctgctgtagcgacttactggaagccattgatatcccaggcagtgaaataattgcaatcatgctcgcaaattttctgctgttcaagcctgcaagtgaagatatattactttgatctcatttgtttttttgctgcctgtgtgccctaattgccatgcgatgttgcaccgacgcaaaccaccgtttacgccggaggagttaaaagcgttgatggatgcgaataaatcaaattaatgaacgctcacctttcgcgccaaaactgtaaaattgcttctacaaacctgtcagaaataatcccccgacgggctgccgcgctgaaatgactgcttcgcagtgccgtcgtccagttctccggtgaccggtacgctgaaccgtaatatcccgtgcttaaatcgtccggatcttcatcaggcgcgttcgtcagtcctctttcaccttgttgctggaagtcgacgaaaataatattggctaaaacattattttgataattgccataaataacttcatacgcatgagggaaattttctttccagtaccaggtggtatcgccgcaaaaccacggcgcgtcagtaatattattaagctgagaatggtatttttttagatccctacgaaaggcttcaaccatatgattaaagtgttgagtgtgtgacgcgtagtcactggtcattaagtcaaattcgccttgcatccagcatacaccgaggaatttgttctgcggattttttgccagtgcggctcgcgttctgctgactaaatcctggtatagcggagtatccgttccccaacgacaagcatcatggctggctccgtgccgttctgaatatgtcccttcgctgcctgcgataaaagccgagccgccacgacaacatggaacgatgagaacccctgcattatcaggaatgaagggcagtaatttccgtgcaatatgcagtgcctggccaacggtgccgtactgtgtttgatgattcgttgccagaggatggtgataaccctgcatatcctgaacatcgtgtgggcagtgagtcagtggaataatgtcgttaaagtgacatgacgggcctccgggatgcgtatgcgcaaatctcgctaattgtttaattctgggatgaggcgcatcttccctgtccggtaatggcagtccttcgccatacgccatggcattagactgaccagcaacggtaagaacatagtaataatcaggcgatattattgcgttcatataaatttcgcgtaattgaaatgacaaattgatagcagggccctttactggggccctgaagcgttagttttgtactgtaactttattatccttcacagagatcaaaactgaatccgtcaccgctttgccgcctgcagtttcaccgccaataattaatagactattattccagggcaatgatactccgtaggcccgaccttgcgataattcacccgatttatcccatttcccgttatgccaaagatgaatatcagcgctatatgattttttcaggccttcatgcgcatagttcttaccgttctggtaattttctcgtgaacctttgaatccggcccctccggcaaatataagagaatcattgcttatccccgcaaaaccgccagcgacgccatctggtgatgagacgggagcaagcttattccattttaaattattaccggtgaaatcaagttcaaatacggcatccgttcgcaatccgggtttggcttcgccattaataagccaggttttatcacctttattcacaaccgccgcaccagccgtcccgtaccagggagattcgccagcgtaactccattgctgtgtagagggatcaaaagacaacagaaacttattaaagaaataatcttctgcttttttgtcaaaatagtgtgcattgattttatctatagcggttgaatcttttccagcttcgttgagatcttcaaaatagccattgaagatattctggttaacaccgccagtaacataagccttgccgttgtgtacaaaagtcacatggcccgccatgcccatcggtgcgtgcgatatcaatttaacccagctattggttttggggttgtatttgtgtacgtcattaaatacctgagtcaagccctcgctgtttttgccaatgccgccaaacacatacagattgccatcaataaatgccgaggttgcttgatctcttggtccaccagggaatgcagctaacgctgtccattttttatctttggcctgtgtatccagcttgtaccatgccgtacctgcgctacctaaaccaatgtagacagtgtcgttatcaattgctccggtaccacttttaaatggtacaggagtttccggtaatacagacgcgtttgcggcaaatgaagccattaggatagcaagcgccgttattgttttattcattgtgactgtctcctgtctactacagtttaaatgacacaccaatgcgataactgttttccgataaattatctctgccgttgtaaacaccctgacggtccaggtagtcatattctatgtatggcgtaatatcgggcgtcatatggtattgtagaacaaatgcattttccgtcgcccatttcttatggtttgcatagcgataatcgttctgtttgctgtatagcgtcgtttgccatgcgaaggtgaaatcactattaatatggtaagtgacatatccatcccaacgatgaacgttatcacgagacatatcaccggataagtcttgttgtcggtaagctttccagtcgtaacgatagcgaatgccaaaattaagatcttttgtcgcgtcccaggacagttttacgtagggtccgtagcgtgtgccgttgctgctaaaatgcgttaacattcccgggcgcaccgtccattgatcatcaagtttaatcgcgtaattaacttcaacctgaacatcattgagtgcggcattttcctttttattatcatgaatggtattccaggtattactttccatgcttgcccaccatccattttgccatccctcactgactttgagtcgagtctcataggcgtggcttccactacgatatccaccacgtacgtccagtgtcgcagcctgagaaattaatggtgacgaaaagcacagtaataatacgccagaaagtattttagcctttttcataaatttcactcatttgtaggatacagaaagcaatacaaagcccgcataaacaattagcatttatgttgtgtaatatttttttgccaggcttatagtgtctttggcaaccggtagctgtattttatattttttgtataatgtctcctgtgaaaaatctctttccacattatttaaataaacagagagccagattaaatacctgagtataaaatctattctgatgtttaattgatttgaatgttcgtaagctatatcacttactcaatccattttacccggagtcataaaatagagtgtctgttgatctcattttcatattcctttcagactgaagtgcgttttcatcacccgatgagaaagaactgaagtgatgtttgccatagattacgagatgcccagtctcattgactatcgtggtgcacctttatacctgttataccagatcaaaaatcacgcaatccatacaacaaaaccagatttgcaattcgtgtcacaaaatatgtcgatctttttctaagaagaagatgccatatgaagccaaacgaacacttgcggaggccatcacaaaccaaagattgttgtttaattatctgttttataagtaatttatttaaagtataaacaaggaaagatttgcaagctaactcagtgggtgtggtgaaaataagtgtttacccgccatcaggctgagcataattctcatcatgaaatatgtttcctggtttgtggcttgtaactggtcacttctgaagtcgatctggagaggcttgttgatgctggtgttttcaggatgatgtttcagatagtttgtttgccgtatcgcccggcgaatagctgtgattgaggaaggtttaagtcgtagtaaccaaagccatatttaccaacgaatgtagatgataaaatcatctcctgcgttcccccatatctccaggataaaaaggaatgtaacaatctcatggcctaaactgacgaaccagccaggaataatcgctagggacctaagaattagcatgataatagccactaagaaattactgcgttccatgaaatagccattttgtggcaaatggagttgactaataatgtcatatgtgagacggctagttgaacgaatattaaattttgctgaattttttatgttgattttacttgttacagaacatatcacatgatatatagataagattagttgcattaatgatgagggttattattagattcgtatccgattgataaatatataaaggtacatagcatgcaagagcatagcgtttgtatggcaacgttattataattaactgttgctactccatttaagttcactcagaagaactggtccacttacgttagttattaagcaaacgttcgcttttataaacataatcaggataaaaatgttggattattgctaacccagcacagctagtgcgcgtctgtaattataagggaaaaacgatgaagaataaggctgataacaaaaaaaggaacttcctgacccatagtgaaatcgaatcactccttaaagcagcaaataccgggcctcatgcagcacgtaattattgtctgactttgctttgttttattcatggtttccgggcgagtgaaatttgtcgattgaggatttcggatattgatcttaaggcaaagtgtatatatatccatcgattaaaaaaaggcttttcaacaacgcacccgctattgaacaaagaagttcaggctttaaaaaactggttgagtatccgtacttcgtacccgcatgctgagagcgagtgggtatttttatcgcgtaaggggaatccgctttctcggcaacagttttaccatattatctcgacttccggtggtaatgccgggttgtcactggagattcatccgcacatgttacgccattcgtgtggttttgctttggcgaatatgggaatagatacgcgacttatccaggattatcttgggcatcgcaatattcgtcatactgtctggtataccgccagcaatgcagggcgtttttacggcatctgggatagagccagaggacgacagcgtcacgctgttttatagagatagttgagataccagggatggtgttaaaaactacattattcttacgatatatcaaaaatgattaaccatttattaattgatgttattgtaagtgtgattcttaattatcataataaacattaagttaaccatatccatacaaaatacaatggtttatgttcttcaaaataaataaacaaaatcattcataaatttacacatcacttaaattcatctgttttcacattttttctttattttttaagcaactggaagttaatccactgcaatctattgttatattgaatcaaatcaatgaaaatagatgttatcacatcagtgatattttatttttgtatgatatttaatgtaattgactgatagccacatcacttcgtgtgtggttatctttttatctattgggctaattttgaccgattgaggtttcctataggtattcattcaaatatatctcagtcaggagtactactattgtgagtaaacgtcgttatcttaccggtaaagaagttcaggccatgatgcaggcggtttgttacggggcaacgggagccagagattattgtcttattctgttggcatatcggcatgggatgcgtattagtgaactgcttgatctgcattatcaggaccttgaccttaatgaaggtcgaataaatattcgccgactgaagaacggattttctaccgttcacccgttacgttttgatgagcgtgaagccgtggaacgctggacccaggaacgtgctaactggaaaggcgctgaccggaccgacgctatatttatttctcgccgcgggagtcggctttctcgccagcaggcctatcgcattattcgcgatgccggtattgaagctggaaccgtaacgcagactcatcctcatatgttaaggcatgcttgcggttatgaactggcggagcgtggtgcagatacccgtttaattcaggattatctcgggcatcgaaatattcgccatactgtgcgttataccgccagtaatgctgctcgttttgccggattatgggaaagaaataatctcataaacgaaaaattaaaaagagaagaggtttaatttaacttattgatagtaaaggtaaaaaacaaataaatacaagacaattggggccaaaactgtccatatcataaataagttacgtattttttctcaagcataaaaatattataaaacgacaaaaagcatctaactgtttgatatgtaaatcatttctcttgtaaattaatttcacatcacctccgctaaatgtaaagctaacgtttctgtgtctcgaagcaacttcctcattcttctctccaaaaaccacctcatgcaatataaaaatctataaataaagataacaatagaatatcaagccaacaaataaactgaaaaagtttgtgcgcgatgctttcctctatgagtcaaaatggccccaaatgtttcatcttttggggggaaactgtgcagtgttggcagtcaaactcgttgacaaaacaaagtgtacagaacgactgcccatgtcgatttagaaatagttttttgaaaggaaagcagtatgaaaattaaaactctggcaattgttgttctgtcggctctgtccctgagttctacagcggctctggctgaaactacacccacgacggtaaatggtgggaccgttcactttaaaggggaagttgttaacgccgcttgcgcagttgatgcaggctctgttgatcaaaccgttcagttgggccaggttcgtaccgctagtctgaagcagactggagcaaccagctctgctgtcggttttaacattcagctgaatgattgcgataccagtgttgccacaaaagccgctgttgccttcttggggactgcgattgacagtgctcatcctaaagtactggctctgcagagttcagctgcgggtagcgcaacaaatgttggtgtgcagatactggacagaacgggtgctgagctgacgctggacggtgcgacatttagtgtacaaacaaccttgaataacggtaccaacaccattccgttccaggcgcgttattatgcaatcggcgaggcaacccctggcgcagctaatgcggatgcgaccttcaaggttcagtatcaataacctacccaggttcagggacgtcattacgggcagggatgcccacccttgtgcgataaaaataacgatgaaaaggaagagattatttctgttagcgtcgttgctgccaatgtttgctctggccggaaataaatggaataccacgttgcccggcggaaatatgcaatttcagggcgtcattattgcggaaacttgccggattgaagccggagataaacaaatgacggtcaatatggggcaaatcagcagtaaccggtttcatgcggtaggggaagatagcgcaccggtgccttttgttattcatttacgggaatgtagcacggtggtgagtgaacgtgtgggtgtggcgtttcacggtgtcgcggatggtaaaaatccggatgtgctttccgtgggagaggggccagggatagccacaaacattggcgtagcgttatttgatgatgaaggaaacctcgtaccgattaatcgtcctccagcaaactggaaacggctttactcaggctctacttcgctacatttcatcgccaaatatcgtgctaccgggcgtcgggttactggcggcatcgccaatgcccaggcctggttctctttaacctatcagtaattgttcagcagataatgtgataacaggaacaggacagtgagtaataaaaacgtcaatgtaaggaaatcgcaggaaataacattctgcttgctggcaggtatcctgatgttcatggcaatgatggttgccggacgcgctgaagcgggagtggccttaggtgcgacccgcgtaatttatccggcagggcaaaaacaagtgcaacttgccgtgacaaataatgatgaaaatagcacctatttaattcaatcatgggtggaaaatgccgatggtgtaaaggatggtcgttttatcgtgacgccacctctgtttgcgatgaagggaaaaaaagagaataccttacgtattcttgatgcaacaaataaccaattgccacaggatcgggaaagtttattctggatgaacgttaaagcgattccgtcaatggataaatcaaaattgactgagaatacgctacagctcgcaattatcagccgcattaaactgtactatcgcccggctaaattagcgttgccacccgatcaggccgcagaaaaattaagatttcgtcgtagcgcgaattctctgactctgattaacccgacaccctattacctgacggtaacagagttgaatgccggaacccgggttcttgaaaatgcattggtgcctccaatgggcgaaagcacggttaaattgccttctgatgcaggaagcaatattacttaccgaacaataaatgattatggcgcacttacccccaaaatgacgggcgtaatggaataacgcagggggaatttttcgcctgaataaaaagaattgactgccgggtgattttaaaccggaggaataatgtcatatctgaatttaagactttaccagcgaaacacacaatgcttgcatattcgtaagcatcgtttggctggtttttttgtccggctctttgtcgcctgtgcttttgccgcacaggcacctttgtcatctgccgaactctattttaatccgcgctttttagcggatgatccccaggctgtggccgatttatcgcgttttgaaaatgggcaagaattaccgccagggacgtatcgtgtcgatatctatttgaataatggttatatggcaacgcgtgatgtcacatttaatacgggcgacagtgaacaagggattgttccctgcctgacacgcgcgcaacttgcaagtatggggctgaatacggcttctgtctccggtatgaatctgctggcggatgatgcctgcgtgccattaacctcaatgatccatgacgctactgcgcatctggatgttggtcagcagcgactcaacctgacgatccctcaggcatttatgagtaatcgcgcgcgtggttatattcctcctgagttatgggatcctggtattaatgccggattgctcaattataatttcagcggaaatagtgtacagaatcggattgggggtaacagccattatgcatatttaaacctacagagtgggttaaatattggtgcgtggcgtttacgcgacaataccacctggagttataacagtagcgacagttcatcaggtagcaaaaataaatggcagcatatcaatacctggcttgagcgagacataattccgttacgttcccggctgacgctgggtgatggttatacccagggagatattttcgatggtattaactttcgcggcgcacaattggcctcagatgacaatatgttacccgatagccaaagaggatttgccccggtgatccacggtattgctcgtggtactgcacaggtcactattaaacaaaatgggtatgacatttataatagtacggtgccgccggggccttttaccatcaacgatatctatgccgcaggtaatagtggtgacttgcaggtaacgattaaagaggctgacggcagcacgcagatctttaccgtaccctattcgtcagtcccgcttttgcaacgtgaagggcatactcgttattccattacggcaggagaataccgtagtggaaatgcgcagcaggaaaaaccccgctttttccagagtacattactccacggccttccggctggctggacaatatatggtggaacgcaactggcggatcgttatcgtgcgtttaatttcggtatcgggaaaaacatgggggcactgggcgctctgtctgtggatatgacgcaggctaattccacacttcccgatgacagtcagcatgacggacaatcggtgcgttttctctataacaaatcgctcaatgaatcaggcacgaatattcagttagtgggttaccgttattcgaccagcggatattttaatttcgctgatacaacatacagtcgaatgaatggctacaacatcgaaacacaggatggtgttattcaggttaagccgaaattcaccgactattacaatctcgcttataacaaacgcgggaaattacaactcaccgttactcagcaactcgggcgcacattaacactgtatttgagtggtagccatcaaacttattggggaacgagtaatgtcgatgagcaattccaggctggtttaaatactgcattcgaagatatcaactggacgctcagctatagcctgacgaaaaacgcctggcaaaaaggacgggatcagatgttagcgcttaacgtcaatattcctttcagccactggctgcgttctgacagtaaatctcagtggcgacatgccagtgccagttacagcatgtcacacgatctcaacggtcggatgaccaatctggtcggtgtatacggtacgttgctggaagacaacaacctcagctatagcgtgcaaaccggttacgccgggggaggtgatggtaatagcggaagtacaggctacgccacgctgaattatcgcggtggttacggcaatgccaacatcggttacagccatagcgatgatattaagcagctctattacggagtcagcggtggggtactggctcatgccaatggcgtaacgctggggcagccgttaaacgatacggtggtgcttgttaaagcgcctggcgcaaaagatgcaaaagtcgaaaaccagacgggggtgcgtaccgactggcgcggttatgccgtgctgccttatgccactgaatatcgggaaaacagagtagcgctggataccaataccctggctgataacgtcgatttagataacgcggtcgctaacgttgttcccacccgtggggcgatcgtgcgagcagagtttaaagcgcgcgttgggataaaactgctcatgacgctaacccacaataataagccgctgccgtttggggcgatggtgacatcagagagtagccagagtagcggcattgttgcggataatggtcaggtttacctcagcggaatgcctttagcgggaaaagttcaggtgaaatggggagaagaggaaaatgctcactgtgtcgccaattatcaactgccaccagagagtcagcagcagttattaacccagctatcagctgaatgtcgttaagggggcgtgatgagaaacaaacctttttatcttctgtgcgcttttttgtggctggcggtaagtcacgctttggctgcggatagcacgattactatccgcggctatgtcagagataacggctgtagtgtggccgctgaatcaaccaattttactgttgatctgatggaaaacgcggcgaagcaatttaacaacattggcgcgacgactcctgtcgttccatttcgtattttgctgtcaccctgtggtaatgccgtttctgccgtaaaagttgggtttaccggtgttgcagatagccacaatgccaacctgcttgcacttgaaaatacggtgtcagcggctgcgggactgggaatacagcttctgaatgagcaacaaaatcagataccccttaatgccccatcgtccgcgatttcgtggacgaccctgacgccgggtaaaccaaatacgctgaatttttacgcccggctaatggcgacacaggtgcctgtcactgcggggcatatcaatgccacggctaccttcactcttgaatatcagtaactggagatgttcatgaaatggtgcaaacgtgggtatgtattggcggcaatattggcgctcgcaagtgcgacgatacaggcagccgatgtcaccatcacggtgaacggtaaggtcgtcgccaaaccgtgcacggtttccaccaccaatgccacggtagatctcggcgatctttattctttcagtctgatgtctgccggggcggcatcggcctggcatgatgttgcgcttgagttgactaattgtccggtgggaacgtcgagggtcactgccagcttcagcggggcagccgacagtaccggatattataaaaaccaggggaccgcgcaaaacatccagttagagctacaggatgacagtggcaacacattgaatagtggcgcaaccaaaacagttcaggtggatgattcctcacaatcaacgcacttcccgttacaggtcagagcattgacggtaaatggcggagccactcagggaaccattcaggcagtgattagcatcacctatacctacagctgaagccgaagagatgattgtaatgaaacgagttattaacctgtttgctgtactgctgatgggctggtcggtaaatgcctggtcattcgcctgtaaaaccgccaatggcaccgctatccctattggcggtggcagcgccaatgtttatgtaaaccttgcgcccgccgtgaatgtggggcaaaacctggtcgtggatctttcgacgcaaatcttttgccataacgattacccggaaaccattacagattatgtcacactgcaacgaggctcggcttatggcggcgtgttatctaatttttccgggaccgtaaaatatagtggcagtagctatccatttccgaccaccagtgaaacgccgcgggttgtttataattcgagaacggataagccgtggccggtggcgctttatttgacgcctgtgagcagtgcgggcggggtggtgattaaagctggctcattaattgccgtgcttattttgcgacagaccaacaactataacagcgatgatttccagtttgtgtggaatatttacgccaataatgatgtggtggtgcccactggcggctgcgatgtttctgctcgtgatgtcaccgttactctgccggactaccctggttcagtgccgattcctcttaccgtttattgtgcgaaaagccaaaacctggggtattacctctccggcacaaccgcagatgcgggcaactcgattttcaccaataccgcgtcgttttcacctgcacagggcgtcggcgtacagttgacgcgcaacggtacgattattccagcgaataacacggtatcgttaggagcagtagggacttcggcggtaagtctgggattaacggcaaattacgcacgtaccggagggcaggtgactgcagggaatgtgcaatcgattattggcgtgacttttgtttatcaataaagaaatcacagggcattgctaatgcaggtacgcaatattacctgaagctaaaacctgcacgttagccctttgtaggccagataagacgcgtcagcgtcgcatctggcataaacaaagcgcactttaccgacaatccgaacagagcctgccaatggcaggctcaggtgctcttttacgctaccatgctaataatcagcacaataatcagcccaaccacggagttgaccagctccagcagaccccaggttttcaacgtgtcttttactgacaggtcaaagtaacctttgaacaaccagaatgaggcatcgttaatgtgggtgagggtgttggaacccgcagccgtcgccagtaccagcagcgccggattcacgccaaccagctgaccagttgctggatcaaggattgctgcactgataatcccggcggcggtcatcgctgaaaccacaccctgacccgtcgccagacgaatcagtacggtgatcagccatgccatgatgtagggcgagatattgccgtgggacatcagcatgccgatggtgtcgccgatgccggtgtcgatgatggtctgcttcagcacgccacctgcaccgatgatcagaatcaccattgcaatgcttttcaccgcgctttcaaaagcgttcattacccactgcatatcgtgcccgcgcgcggtgccaaagagtacgaatgcaaccaccatcgcaataaacattgcaatcggcgaggaaccgataaagttaaccacttcccacgcaggggtatcttttaccagccagatattggcgatggtggtagagatcataatgatcgccgggatcaacggcaccagaatcgaaacgccgaaagagggcagattattcatatctaccggttgatctgctttcaggaatgatggcgttgggcgctcaagattgccgaggaacttcggcaggatcagacctgcgcagatgacacttgggatcgtcaccagtacgccatagatataaaccatccccatatccgcgccataagcattcaccagcgccaccggacccggctgcggtgggaacagtgaatgtgcggtagtggcagctgctactgccgggatcgccagtttcaggaacggaattttagcttcggcggcaataacaataaccagcggtgctaacatgataaaggccacttcatagaacatcgccagaccgaaaatcaggccgatgataatcaccgacagctgtacataacgcagaccgagacgtgccagcagcgtatgcgctatctggtgagccgcgccggagtcgaccatcaatttaccgatgaccgcaccgaacaccacgatgatagccagttcccccagcgtgttgccgaagcccgctttcatggtgtgcagcagcgacatcaaatccatgcccgccagcatcccgacggacagcgccgccaccaacaaggccaccattgaattgattttgaacttcaaattcagtaccagcatcagaccaatgccgaataccacccagagaatgttaagcacatgcataacgttttaccttacctggttgaaccgttgttattttgggcgacatgttatgtaaattggtcaaccattgttgcgatgaatgtcacatcctctgatcaataaccatcgattaccttttgctgcaatttgcagcaacaaccaggagagtgaaattcttgtgatgtggttaaccaatttcagaattcgggttgacatgtcttaccaaaaggtagaacttatacgccatctcatccgatgcaacgccacggctgcggtctggttgttcatccggatacctaaacaactccagggttccgcgtctctttgctgtggaacccactatgtgaaagaggaaaaatcatggaacagacctggcgctggtacggcccaaacgatccggtttctttagctgatgtccgtcaggcgggcgcgactggcgtggttaccgctttgcaccatatcccgaacggtgaagtatggtccgtagaagagatcctcaaacgcaaggctatcgttgaagatgcaggcctggtgtggtctgtcgtagaaagcgtgccaattcacgaagatatcaaaacccacactggcaactatgagcagtggatcgctaactatcagcagactctgcgcaacctggcgcagtgcggtattcgcaccgtgtgctacaacttcatgccggtgctcgactggacccgtactgacctcgaatacgtgctgccagacggctccaaagctctgcgcttcgaccagatcgaattcgctgcattcgaaatgcatatcctgaaacgcccaggtgcggaagcggattacaccgaagaagaaattgctcaggcagctgaacgcttcgccactatgagcgacgaagacaaagcgcgtctgacccgtaacatcattgccggtctgccgggcgcggaagaagggtacaccctcgaccagttccgtaagcacctggagctgtacaaagatatcgacaaagccaaactgcgcgaaaactttgccgtcttcctgaaggcgattattccggttgccgaagaagttggcgtgcgtatggctgttcacccggacgatccgccgcgcccaatcctcggcctgccgcgcattgtttctaccattgaagatatgcagtggatggttgataccgtaaatagcatggcgaacggtttcaccatgtgcaccggttcctacggcgtgcgtgctgacaacgatctggttgatatgatcaagcagttcggtccgcgtatttacttcacccatctgcgctccaccatgcgtgaagataacccgaaaaccttccacgaagcggcgcacctgaacggtgacgttgatatgtacgaagtggtgaaagcgattgttgaagaagaacaccgtcgtaaagcggaaggcaaagaagacctgatcccgatgcgtccggaccacggtcatcagatgctggacgacctgaagaagaaaaccaacccaggttactccgcaattggtcgtctgaaaggcctggccgaagttcgcggtgtcgaactggcgatccagcgcgctttctttagccgttaatatccaccggcatggctgcgcgccgtgccggttccttcttccttgccgtcactctctgaagacggattctggagtttacgatgactactattgttgacagcaatctgccggttgcccgcccgtcatgggatcattctcgtctggaatcacgcattgtgcatctcggttgcggggcgtttcaccgtgcgcaccaggcgctgtacacccatcatctgctggaaagcaccgacagcgactggggtatctgcgaagttaacctgatgccaggcaacgaccgcgtgctgatcgaaaacctgaaaaaacagcaactgctgtacaccgtggcggaaaaaggcgcggaaagcaccgagctgaaaattatcggttcgatgaaagaagcgctgcacccggaaatcgacggctgcgaaggtattctcaacgcgatggcgcgtccgcaaacggcgattgtctctctgacggtcacggaaaaaggctactgcgctgatgcggcaagcggtcaactggatctcaataacccgctgatcaagcacgatctggaaaacccgactgcgccgaagtccgcgattggttacatcgtcgaagccttgcgtctgcgtcgtgaaaaagggctgaaagcatttacggtgatgtcctgcgataacgtgcgtgaaaacggtcatgtggcgaaggtcgcggtactggggctggctcaggcgcgtgacccgcagctagcggcatggattgaagagaacgtcaccttcccgtgcaccatggttgaccgcatcgttccggcggcgacgccagaaaccttacaggaaattgctgaccagctgggcgtttacgacccgtgcgccattgcctgcgaaccgttccgtcagtgggtgattgaagataatttcgttaatggtcgcccggactgggataaagtgggcgcacagttcgttgcagacgttgtgccgttcgaaatgatgaagctgcgtatgctgaacggtagccactctttcctggcgtacctcggttacctcggcggctatgaaactattgccgacactatgactaacccggattatcgcaaagcggcctttgccctgatgatgcaggaacaagcgccaacgctgtcgatgccggaaggtacggacctgaacgcctatgcgacgctgctgatcgagcgtttcagcaacccgtctctgcgtcaccgtacctggcagattgcgatggacggcagccagaagttaccgcagcgtctgctggacccggtgcgtctgcacctgcaaaacggcggcagctggcgtcacctggcgctgggcgtggctggctggatgcgttacacccagggcgtggatgagcagggtaatgccattgacgtggtcgacccgatgctggccgagttccagaagattaacgcgcagtatcagggcgcagaccgcgtgaaagcgctgctaggcctgagcggtatttttgccgatgatctgccgcagaatgccgactttgttggcgcggtgacggcggcatatcagcagctgtgcgaacgcggtgcgcgcgagtgtgtggctgcgctgtaactaactgattaccctacagacttactggtcaatcaaactgatatttggttgaccagttttcgtttttttgcccacctgtacgtgccaacttccagtgctaatggtatagtttgagattaacaggggccgtaaaattgcccgttgtaggccggataaggcgttcacgccgcatccggcaaaaatttgattaaccgcacctaacggacacaacaccatgaaatctgccacctctgcgcaaagaccttaccaggaagtcggggcgatgatccgcgatctgatcataaagacgccgtacaatcctggcgaacggctgccgccggagcgtgaaattgcagaaatgcttgatgtcacgcggacggtggtacgtgaagcgctgatcatgctggagatcaaagggctggtggaagtgcgccggggtgccggtatctatgttcttgatagctcaggcagccacaacacagacagttcggatgccaacgtctgtaatgatgcgggtccttttgagctgttacaggcgcgtcagttactggaaagtaacatcgcggaatttgccgctttgcaggctacccgcgaagatatcgtcaaaatgcgtcaggcattgcaactggaagagcgtgaactggcttccagcgcgccgggtagcagcgaaagcggtgatatgcagttccatctcgccattgccgaagcaacgcataacagcatgctggtggagttattccgtcagtcctggcagtggcgggaaaacaatccaatgtggatccagttgcacagccatctggatgacagcctgtatcgcaaagagtggttgggcgatcacaaacagatcctcgccgcgttaatcaaaaaagatgcccgagcggcgaagctggcaatgtggcagcatctggaaaacgttaagcaacgtctgctggaattctcgaacgttgacgatatttattttgacggctatctgtttgattcatggccgctggataaagtcgacgcctgacttattataataagcgcaagggtaaacgttccttgcgctttcttaaattaagaagtcgcaatgagtattgctttgtaaattgcagggtattgtttaaatatctgtataacctgaatattagtactcattcttctcagtggctatttaccaatataattccattcaccattttttaattcaaacagttctggaagagatgacggttgcagagtcatgcgtttgagtggcgcatcttcatcaccggggataactttatatcccatttttgcatggatctccgcggtaccaggataggcttctataccaatgattgggtcatttcccatctcaatattagcattaagtaatgcggcaagggcgaatccggaagaatttgctacccctgagacagttattatctgatcaatatagatatcaattcttggctgctcattggtccatctttttgcctgagaaactggaagggttgaaatatatcctatcgtggttccggcgtaacctggaacattgcaaccagggcctaatgttatttcatgaactgtatagtcctcaacaggatcgaaagggctcttcataaataaatttagccgtaaaccttctgctaattctgtagcagcatgcgcctttttacatatgccaccatatatttcgtctaaagctgaggtgattttcaagtttcgatagagcatacgtcctgttgttgtaataccatcggattctctgcatgcttctgtcacataattaaatggccaggactctttactaatatcaagttttctaatttcgacaacgctttttccatcgtaattatggttattgccacgagcaagaggcagaagatagatattttccgtatccaggcgtgcacgttcatatttacgtgttaactcactgtcgacttttggatgatgaaggaagtgattatctgtaataatttggctctgaagggtattgcttaatggcatagacataatagttaccttttatgagtatttcactgatgtttagaaaaatagataaatttttctgtagtaaaatgagaagtaaacaaatgacatgcatgtttctgttgtagtgatatcaactctacacggtgatattaaagggtaggaaacactctaaagtatcaaaaaacgctcatttgaaattattttcatgcaatttaaaagcatatcttattactaattggaatttgatgttgctatattgatgtatatattaataatgcctgtgaatggtatttttgatgtatttgatatgttatcaatttatattatttacaaactaattgtttcaaataatacatggctgattatgcggaaataaataatttcacaccggaattaagtagcggtggtgacaagtattttcatctacgtaactattcggaatattcagaatatactagcggtttttttttgagtttgatgatttttatcaaatcatgacttttttcctgaaaagtcagtagatattcataggcaagtaaggttttatactttgctgacaggattcaggcctgtctcagactgacatggatgtaatgaacaaaagggaatggctatggaaaatgagcatcaatacagtggtgcccggtgttcagggcaagccgcatatgttgctaaacgtcaggagtgcgcaaaatgatgcgccaatcacgtcaggctgttttacctgaaatttcaggcaataaaacgtcatcgctgcgtaaatcaatatgtagcgatctcctcactctttttaattctcctcattcggcattaccgtcattacttgtttcaggcatgcccgagtggcaagtgcataaccagagcgacaaacatctccagagctggtattgccgtcagctgcgttctgcactgttatttcatgagccacggattgcggcgttgcaggtcaatctgaaagaagcgtacagccacacgctggcgatcagccttgagataatgctgtaccacgacgatgaaccgctaacgtttgatctggtctgggataatggcggttggcgtagtgcgacgctcgagaatgtcagctaagtacaatctccagctcgcgcagttcacgccagaagcgttcggcaactggattcatgcgggtattcattcggtatgcataggcctgaatcgggatcaccagttcgtcccgattcagtacaacgagctgcccgctgcgaatttcttgttggatggcgaactccggcagccaggcaatcccacagccgtcgagggcaacctgctttaaaagctcgctcatcgaagagacaaaaaaggtgctgaaacttaactcactgtggcgcgtcagggtgcgattaatcaatcgccccatgtaggagttgcggctgtaattcagtaacggaaagtgtggctgcgcgaggttaaaaagtgcttctccgtgttcgtcactggcgcagacagggaacaattgagattcaaataagcgaatgtggtcaaacggcgcttccagcaaatcttcgtcgtgaaaggaaaaaatacagtcactttgcccttcacgcagtttatcggctgcttcatcaacatcaatggcttcaattgcccaggtaaagagcggcggcatctggctgataatggacggtaacagaccgagggaaagagaatgtgcagcggctatcttgattttacgttgcgcgtaatcgctgccgccacgcagctctgccaggttgctttctaactgttgcaacagatggcggatctgcgaatgaaagattttcccttgttccgagagttgcagcggcgtcacctggcggttaaacaattcaacgccaatcgcctgttccagcgcgcggatgcggcggctgaatgccggttgcgagacgtaacgactgactgccgcctgggaaaaattgcggcatttttccagggtcagaaaatcataaagccatttggtttcaatattatgcaaaaccgcaccacagtcatccattacgttttactctgtcagccgcccttgtgggcattctacgtccattcgggcggctgacaaccgtttatgccgtttcaaacgttcctttcacgcaggctttgccgtctttgaccatcagtttgccgcgagcgtatacctgctcaatgcgcaattctggcgtcatgaccagtaagtctgcgtcattgcctggcagaatttcgcctttcccgctcaggttaaggaaaccggctacgctactggtgagcgggcgcagggcatcgctgatactgaaatcatagtctttgaccagcacctgcacggtttccagcaacgtttcaaaacctgcaacaccgatatgggttaaattcccttcgtcatcgaagaacggctggctaccgttgccgtcggagctgagggtgacgcgtgccagcggaatacccgcctgaacggcgcgggcaataccttcggcaggggcgaccggttcgtcaatgctgctggtgatatcgatggtgccgcctttgcgcgcgaactccagcgcctgctcaaacaacggtacgttgcggttaacgtgggtcggcagcagcttgctgatcggcacatcgcagttttccagcaggtcatagacaggctgtaacgcctttttactgtcgcccatgtggaacacggtgacgccaggtttaccgccgagcaaaccgccaacgcgggattctgccgccatattggccaggtgataaacgtccggtgcggcagaacggtgatcagagatggcgcatttcacgccaatcacacgatcaataatcgccacgtctttttccacggaacccgtaatggtgcgggaagggacatgataagcgccggtcagcatccaggcgctgatgccttcttcattgagcgcacgggtcttggcgagcagggattccgggtggcgagagatagagtcggtgcccagcagaccaaccactgacgtgacgcccgcttccgtcaggcgacttagcgccacttccggcgtgcgcgtcgtgggacctgcttcgccgccaccgccaatcaaatggacgtgttgatcaataaaacctgggcagaggatctgcccgctgagatcgacaaccgtgcagtccggtacaatgtcagaggggatattactggcaacggcgataattttgccgttagcgacgaggacatcgcaaattccccgatcttccggcgcatacaaatgcgctccctgcagcagggtaaaaccggctgcggtataatcaatcatggtaactccttgttaaacaataagctgcataacccagatcgacagcaatgcgttaatcacgcagaccgtaatgatatgcgggtaatatttggcattcacttcggctgtccccaggcagcgaccgacattttgcaccgggttgcccattaaatacatcgcgggcagtaaaacggtgacatcgtgaccggttaatgcgccagcggttgccagactggcggcaacaccgactgcgccacccatactcattaatgcggctaaaaggacggttgccgcttcaccgggtaatccccacagcgccattacgggttcacagatatgccccacccagtcgagcaggccggtaattttcagcgcctgaatgatgacaaacgccatcaccacgtttggcagcaggttggtcgtggcgatagtaaagccacggcgcgcaccatcgataaacatatccatgacgtttttgcggacctgagttgtcatgcttgcgctccttgcgttgggttgcgacgttcttcgaagttaagccagacgcgcaaaatgttggctccgacaaatttaaacacctggatgacggctaaaggtacgattacggacgtgcccagaaaggcgaacaccgcgacgccggaagagaagtagttggtgatgatggcgctaccgctggtttgatatgcggcgaaaatcactttatcgcgttcggtaatttcaccttcctgcgccagatctttggtcataccggcggcggcatcagtgttttgcaggttagcgatcagcgccagcgagcagatccctggaatgcccaacaacggttttagcacaggcgtcattaactgctgcgcggcgcgtaatccaccaagaccatcggtaattgaaataatccccagagagagaatgactgacggtgccagctccagcgcaaagagaaagccatctttagcccccgcgccacccgccccgcgaaatgaggtggtggctccattcgcaccaggtaactgcccaaacgatccgttcagcacggaaaaatcaaaaacgcgccaccagctgtctgttcctgaaaaaacaccggaaaaaaagattatggtgagaaaaaaagccagataccctttaatgcccactttttctgtcgccagctccccggctacagcatccccttgttgtgtcataacaatccccattgtttttttgtgtttgtgtgttgcttgagccaggaaaattcctggagctgaaaaaccttatcagccatgtgggtatggggaaaatgcaagtatgtttctggctatgcgttttttgcatagcggaaaaattacgctatggggaaaaggttctgcgctggattgagttgcagtaaattcataaacccagtgacaatgacataagtaaataaaaacagaaaatccagggacgaaaacgagatggcaaagtacaacgaaaaagagctggcggatacgagcaagtttttaagttttgtcctccgacacaaaccggaggcgattggtatcgtactggaccgtgaaggatgggcggatatcgataagctcatactttgtgcccaaaaagcgggcaagcggttaacccgtgcattgctggatactgtggttgccaccagcgataaaaagcgttttagttattccagtgatggtaggtgcatccgcgcggttcaggggcattcgacttcgcaggtcgctatttcctttgccgaaaaaacaccgccacagtttctctaccacggtacggcaagccgtttccttgacgagataaaaaaacaggggctgattgcaggtgagcgtcactacgtacatctctctgctgatgaagcaacggcacgcaaagtgggagcaagacacggatcgccggttattttaaccgtcaaagcacaggaaatggcgaaacgaggcctccctttctggcaagcggaaaacggggtctggctgacatcaacggttgcggttgagtttcttgagtggtaagggaaacttccctcatgaagtgaccacttgtagcttaaataattgcactgtgctgataagcgcagcaataaacaacgccgccgcgccgcagagagtggcgctggcaagcgccgatgttccattgccgagcatactggtcagcgccgggccgaggatttgcccaatgccgtaaatgagcgtcacaaagcctaaaagattgagatttcccggtacgctcagttggcgggcgatagtcatcaccagagatgtcgtgcccataaaggtaccgccaaaaccaagactgctgatgataagcaagagaggcgagtcgctggcgagagtaagcagcacacagatagcctgcaccagcaaattcgccgtcaggcagggcaaagccccccaacgttttgctgcccatagccagccaaagcaaccaggcacaattgataagccgactaacgtccagagatgggcggttaacaatggtgagcctgcatctttcgccatgagcggcaggtaagtcgcgacgatgatataaccaaatcccgccaggccgtacagaatagccagtaaccaccagctcattatctgttgctccgtttttgccaatggcattggtgtgatggcgtgttttttcgagggcattaaaagcgtaagtgcaatcagcatcatgccagaaagcgccccggcgccttgccataacgtttgcgaggagaggtcaaaatgcaggcctgccagaacatattcattgcccagtgcgatgccaatgccaacgccagaaaacaaagctgccagcacaaaaggatggcgcgtgtgctgcataatcagcgtcgaaccaaaaatcagcataccggcgctggcgacacccgccaggacgcgaatcaataacaccagaataaatggcggcaaccatgccattgcgaggatcaacaacccgctcgccagggcagaagccaacagaaatgggcgcaggcgcgatggctggtgaaatgcgccaaaagaaaatagcagactgccagccagataccccgcatagttgccgctggcaatccacgagagctggctaaatgaaaacgatccttccgccatcatgacgggcaacataggcgtataaaggaagcggcctaaacccatacctaaggtcagaaccagcatcccgaaaagcgcggtgctgaaagaaaagcgttctacgggatgcgtggacgaaggcatgtttaaccttgtttgtcatttttgttgttaacaagttaataacaaaaaggtgaagcatgccagcctgttaatgcgatgattgaggggtaaagcgataaaaacgatttggttcgctaacgatataaatattaccagaggcatccatcgcaaccccttcggcctgtttgatgttatgcgacaaacctcgactgcctttggttagtgacatttcaccgataacctcgccaaccagcgttacttcctggagtgcgcgagattcatgagacagcaccagaagcgtatttttttgttggttaaattctgcgccggacacatcatctaaagtaaattgccgttgtagtgccttgtctttgctgatgtgcaattcattgctacttaatagcccgttaactttgtagacctcaatcgggtttttctctttaaaaaaccagaaagtgtgatcctggcgagaataggccaatccttcaaaaccgcaattggttggggattcctgcagcgggatttttatttttttgaggatttttacttccgagtttggggtcagtgaaatcacataaatggcataatcgcgctcatcgctaatgacaaactgattatcgccaatgtattcgatcgtctcgagatccttaacaaaatccagaggaattgtgcggatcaaatcaccattggtggtcatttcaacaatggcggcaggtttgttgatagtgctaaaaagagtattgctttgtgccgaccaggtcagcgaagagatattattcgttatgcctgcaatttctttgccgtcaatggtggcgtggtaattctgaaatgatgctgcatgattgcttttacgggcgcaagattgcacgaagaaagtacacactgccacaatgacaaaaagaatcacaataacgaagatgcgtttacttaacgaaatactttttgtcacggtaatccctttaaggcaaatcaataagatatcgagaagtatacgtagcgatcttaatgaatccttaacgcggagaaatcccgtaatgtgcaatgcagcgccagccaccatcctgctgacaataaactgattccgtatgcccagggatcacccattgaatttcctcgccaggcggacaggtcagccaaatgcataacccgcagccgccgcgtaaatcacggggaatatcgctgacgcgaaaagtcatgcccgctgcctgcaacgccttgcgggtttgtatgacgccgaccgtggagtgaaataaaaatagatactctttcatgcgcgttttctctgccgctgaccgatcaccgccgcgccaattgcaccagcgaattgcgcatcagggtgagtttgtaccggcattcccagatggctttccagcatgtgggtaaacctttgacagtggctaacgccaccagtaaacagaatcggcgcttcacaggagagacgagcaatgaaattggcactccgccgcgccatcgcgttaatcactccggcgagaatcgcttctggcgcgacgcccgctgagcgcaggctgatcacttctgattcggcaaatactgtgcacatactcgtgatggcgtgcggcgtgacattttcggtaatgctgtcgagctgttcgacgttggtgccaagcgtgcgcgagatcacctccaggaaacgcccggtgcccgccgcgcatttgtcattcatcaggaaatcgcacaggttaccgtcatcatcaagctgaatcactttgctgtcctgaccaccgatgtcgattactgcgcgcgttgctggcgcaagaaaccgtgcgcccagcccgtgacaggagatttccgtcacctgtttatcggcaaaatccaccagttgccgtccgtagccggtgagcgtcagaaacggcgttgtttctaacccttcgcgcagagtttcccaggcttcagtaattgctgttgccgggcgaaagggtgttggaacgaggaaacggcgcgtaatcacgccgtctgccagtaagatccctttggtggcggttgagccggaatcaatgccaatcgaatatgccactgccactccttacagcatctcaataaaggccgcgacacgggtactgagctgcccgacatccgaggtggagtagtctgtttcaatagcgatataaggaatgttgtgctgctggcgcacatgacgtttaatcgccagcgattccaccgcgtaggtatggcacgcctgcaaaatcacatcaactacgccatcgacctgatattcctccaccatctggctgagcattttcaggcgctgatcgttcggcgaaacacaggagcagccaatcgccagatatttatccgccagcgcgtcgtagacatcgcccgtttctgccacgcattgctcggtcgctttcgccccggtgcagttttcataaccgacaacccagccgccattctcttcaatcgcgcgcaccactttttctgctgcgccgccaatcgggcagccggtgattaaaatgcgcggacgcgggtccagtcgctggccttcttcccactgctgacgaacgcgggcggtcattgcatccagttcattgatcaacgcctctttatcgaaccggaaggttgcgccgtaaaccactttcagaatgtcgctgccgctaagcgccggaggatttaactgcccaagatgataaaaattagccagtgcgcgacgttcgcggtttttcagcgcaatggcatcgcgcagagcatcttcgctaatctcgtgcccaaaacgttcttctaccgttttttgcaagcgcagcatctcggctttccataacgcacgcgaggcatcgtccttaacgctgttgggcaattgcatcacatgaacaggcttaaactccgccatgtattcatacattttctttttgccgtcgcaggtggtttcaccgaccaccagatccgaaaagtagaagtaggggcatttatcggttttgccgaagccgtagctgcttttaatcagcgggcagaggttgcgcggcagatctttctccgcttcttcaatggtttcatcagaggtggaacagagcgaaaccacaaccgcaccggctgccatcgggatctcttgcggcataaaggtgcagtaagtgccaaccagcggaatgccgcgctccttgagatccatgacggtgagaaagcctgtctggcgagcttcagagaactgatcgaaaatggcgggtagatcggtgacaagtgacatgattttccttccccgtaccacgggagataatgaaaagaggccacattattaccattcttttagtatggtttatttgatctctctcgcggttagccacttagtttttcatggatttctaaaaattgccgagggggaacaaggccgggagctgcgacagcaaatataaaattagcccaatacaaccgccaaccagcgtaccgttgacacgaataaactgcagatctttgccgatatttaactctatttgccgcgacatatcccgcgcatcccagctttttaccgtatcgctgatgtggcgcgtcaggaatgcggaaaactcaggcgcgacgcggtgcgcggcttgttcaagatgaccatttaacgacgcccgcaaggcatcatcggcaattaacgtttcgccaaaccattgacccgctcgtgcgatgcgttctttcacacgagaatcttcactgttgatatccactttcagccattcccgtaaatccccccacaattcactgagatagcgattaaaagcttcatcttctttcagatagctttttacggcatcggctcgcgctgccatttccggatcgtttttcagcttgtcgatcagggcgaaggtggcgcgatcaaacgcatggcggatctgatgcgcacgatcgcgactaatatcatcaagcaaagaattcaccgcgtcagaaaccaactccgcgctatgttcgcccaaccattcggtggggagaattttggctttcagtggatgctcgctctccagccagcgaacaatttgctgggcgataaacttgcgcgatttatcgcgctggagaagggcgatcaactgtgcgatcagcgtatccagcagcacctgatgacgatcgtttttggtcatactctccagcatcaacgcactggtgccggaaagatcgaccttatcaatcgcccgatggaccgcgcgcttaagcaggcgctgaatacgcgcatcatcggtaagttcgagaaaaccgctcatgatctgcaacagatgctgaccaacgcggcgggcgttttctggctggctaaaccagttgccaatcagcaacgccggttcgtggcgtcgaatcaatgccaccagggattgagtatcaagaaatttttcctgcacgaactggccgagattttcgccaatccggtctttattacgcgggataatcgccgtatggcgagaaatgatcggaatcggcacgcggcgaaacagcgccaccaccgcaaaccagtccgccagcgcgccgaccatcgccgcttcagcaatcgccttcacgccgctcacccaaaaattgggcggcaaaaacagcgtaacgacaaaggtagcagcggcgataagcagtaaagagagcgccaacattttggcgcgtctgagttcaatgagtttattcataacgttaagaatagagcctgacggcaggatcgcgcaaaaatcactgctcctctgccagctcggcagcctgatgttggcgcacgcgattaagcaatcccgccagggtgaaaacgacgataacgcccgccacgacggctaacagatgaaacggcaagcgaccgccgttaaaccacagccaccggccgatttcgaccgagacagacatcaccatcaggatcaccatattcagcgatgcggagacggtccctttcggtaagttattggaaaacagcgtaaagcggaataaggtcgggaagatcaaaccaatcccgaaagcatacaaactggtgcccagcaccgaccacagccagacgtgcggtgacagcagattgccgataatcaacagcgcgaggccaaccagttgaatgggtacggcacgccagataaagcgcggttcggtcggatctttaacgaaacgcgccacgatggcattcgcgacaatcaccgcgccgaacaccggaacctgtgtccaggcgaactgcgaggtcgttaagccgcctgcgtcaatcaggatcaccggcgagacagccacccaactcatcattgggatatagcttaaagagatggttgctgcaccaaagaggaactgccgattgcaaaagacattacgaaaatcgcgcaagacgcttttggcgctaaatgaaaccgcgccgcgcttcaccgtctctggcatcgccagcagtaagccaacaaatgagataaaacccataatcgcaatgatggcaaaaaggactttccagtgtacaaagtgcatcagagctgcgccggaaagcgggccgataatcggcgcaatcagtacgatggaggtgataatcgccatcaacctgatcccttttgtctggccgaacgcctcctgcaccgtgacataaccaacggtggcaataaaacagatactggtgccctgaattgcacgcgcgataagaaactgtgtcatagacgttgtgaacattgtcgcagcgcaggcaagggtaaatattagcgccccggtaatcagcaccggcctgcggccaatcctgtcggaaagcggccccagcagccactgtaacgccataccgcccgcgagatagagactgacggctgccggggccagactgacatcggcattaaaatcacggaccacattaatgatccccggctgaatcaggtccgtcgacaggtacgcggcaaaatcatacaaaatcaacgccatcgggaaaaacagcgtggcggcatgcgttgcttttaatcccgccattaagcctttaccaaaatggttattcatatcagacctatatgcctcgtgtttaactgtccaactttttggggtcagtacaaactttgatttatagtcaggtggggcttttctctgtctgcctttcggtgaatacctgagacaaacagtctcaagcacccgtggctattctagcttaataagtttgtttcttctccttgatataatcctaaaaaaatctcataaaattaatatatgagataatctttattcagcagaagattattaaaggttgctgtattatttagcgataaaaaaagcctgccagatggcaggctatttaataacggcgttattattgcaacagcgaaatatccgcaacgcgcaggaacagttcgcgcagtttctccagcatggtcagacggttgatacgcaattctttgtcatcaaccatgaccatcactttatcgaagaaagcatcaaccggttcacgcagctcagccagttcgaccagcgcatcctggtaacgaccttccgtaaagtacggctccagcttgtcacgtagcaccacaacctgcatcgccagtttaatttcttccggctctttcagggtagaggcattcacgcggtcgctcagcacttcgtcagatttcgccagaatgttagatacacgtttgttcgccgccgccagtgcagcagctgcatccagggtacggaaatgcgataccgctttcatacgggcatcgaaatcagccggacgagtcggacgacgcgccagtaccgcctggatggtgtcaacggtataaccttcgtcctgataccaggcgcggaagcgaccgagcataaagtcgataacatcatcaactacgttggcattagtcagcttatcgccatacagacgcaccgcttcttcggtcagcgtttgcagatcaaggttgaggttcttctcaacgataattcgcagcacgccaagcgcggcacgacgcagcgcaaacgggtctttgtcgcctttcggatgctgaccgataccgaagatacccgccagggtatccatcttgtcagcaatcgccagcgcacaagctactgggttggacggcaggtcatcaccagcaaaacgcggctgatactgctcattcagcgccaccgcgacatcttccgcttcgccatcgtgacgcgcatagtgcatccccataacgccctgggtgtcggtgaactcgaagaccatgttggtcatcaggtcgcacttagacagcagacccgcacgggtagcgtggttaacgtcagcgccaatctgttcagcaatccagccagccagcgcctggatgcggtcagttttgtcgcgcagcgtccccaactgttgctggaacaacacggtttgcaggcgcggcaggttatcttcaagacgttttttacggtcggtgttgaagaagaactcggcatccgccagacgcggacgaacgactttctcgttaccggagataatctgctgcggatctttcgattcgatgttggcaacgaagataaagttcggcagcagtttgccgtcgttcgcatacaccgggaagtatttctggtcacctttcatggtgtaaaccagcgcttcagccggcaccgcgaggaatttctcttcgaattttgcggtcagaacgaccggccactccaccagcgaagccacttcttccagcaggctttcgcttaagtcagcgttaccgccaatcttacgcgctgcttcttcggcatcggctttaatcttcgccttacgttcttcgtaatcggcgatgactttcccacgctcacgcagaatttccggatactgatcggcgttatcgatggtgaattccggctcgcccataaagcggtggccgcgaatcacgcgatcggactgaatgcccagaatggttgccggaatgactttgtcgcccagcagcagggtcacggtgtgcaccggacgcacgaagtgcacgtcgcttgcgccccaacgcatcagtttcgggatcggcagtttcgccagagaagtcgcaaccatattcggcagcagtgcttcggtgctttcgcccttcacatgggcgcgatacagcagccattcgcctttatcggtagtcagacgctcagcctggtcaacggtaataccgcaaccacgcgcccaaccttctgccgctttgctcggtttgccttcagcgtcgaacgcctgggcaatcgccgggccgcgtttttcgatttcacgatccggttgcgcttccgccaggttagctactttcagcgccagacgacgcggagcagcaaaccattgaacggtgccgtgtgcgaggccagcgttatccagctccgcagtaaagttcgcagcaaaggactcagccaggctgcgcagtgcttttggtggcagctcttcagtgccgatttccaccagaaaagttttctcagacatagccgcctcttacttatctttgttgcacatcgggaagccgagggcttcacgggaagcgtagtatgcttctgccactgctttggtcagggtgcgaatgcgcagaatgtagcgctgacgctcggtgacggagatggctttacgcgcatccagcaggttgaagctgtgggcggctttcagaatacgctcgtaggctggcagcggcagcggattttccagcgccagcagctgctgcgcttctttctcgtactgctcgaagcaggtgaacaggaagtccacatccgcgtattcgaagttgtaagtggactgctccacttcgttctgatggaacacgtcgccgtaggtggttttacccagcgggccgtcgctccagaccaggtcgtaaacgctgtctacgccctgaatgtacatggccagacgttccagaccgtaggtgatctcgccggtaaccggtttacactccagaccaccaacctgctggaagtaagtgaactgcgtcacttccatgccgttcagccacacttcccagcccagtccccaggcacccagcgtcgggttttcccagttatcttccacgaaacggatgtcgtgaatagtcgggtccatgcccagctctttcagagaaccgaggtacagctcctgaatattgtccggcgatggcttaatgaccacctggaactgatagtagtgctgtaaacggttggggttttcgccgtagcgaccatcggtcgggcgacgagaaggctgaacataagcagccgccatcggttctggccccagcgcgcgcagacaggtcattgggtgagaggttcccgcgccgacttccatgtccaatggttgaacaatggtgcagccctggcgagcccagtaatcctgtaaggtcaggatcaagccctggaaggtcctggtatcaaacttttgcatattatttcgtgctggatacgtgtggatttaaaggaagggatcagtatacccgctggatggaagatatacagtacgaaacgggaaaaagcagggcttaacgcatggaaagatgcaaaaaatggccatccgcgtcaaaagaacagacaaactgctctttacggaaggtataaccgcgcatttcatagcttccctggaactgttcgaaggcggtgacgtcgattttttgctcgccggtgttataacgttttgccgcctgatccttgcataacgcttccatattcaacgaacgcagaggatcaacctttacccgttgtgctttctgcacgggtgacggtatagaacaacccactagcaccataagcgccattgccggaaagaaagcgttcatcatcattaaattaccgtctggtttgcaggtgagtcttattatttatatcggtatagtggctgatatcttacgaatttccttaagcctctataagctgtagtgataaaactcagattattccagtgcgccaaccaaatgatttatcggtcagactttttttaaccagatacagagacacagatgcagcccaaaatttactggattgataacctgcgagggatagcgtgtttaatggtggtgatgattcacaccactacctggtatgtgaccaatgctcatagtgttagccccgtcacatgggatatcgccaatgttctgaattctgcctctcgtgtcagcgtgccgctatttttcatgatttccggctatctcttttttggcgaacgcagcgcccagccgcgccatttcttgcgtatcggcttatgtctgattttttatagcgcaatcgcactgctctacattgcgctgtttacctccatcaatatggagttagcgctgaaaaacctgctgcaaaagccagtgttttaccacttgtggtttttcttcgcgattgcggtgatttatctggtttcaccgctgattcaggtgaagaacgtcggcggaaaaatgttgctggtgctaatggcggtgattggcattatcgctaacccaaacacagtgccgcagaaaattgacggttttgaatggctgccaattaacttatatatcaatggcgatactttttactacattctgtatggcatgttgggccgcgctatagggatgatggacacacagcataaagcactgtcgtgggtgagcgccgcgctgtttgcgacgggggtttttattatctctcgcgggacattatatgaattgcagtggcgcggaaattttgccgatacctggtatctttactgtgggccgatggtttttatctgcgcaatcgcgctattgactctggttaaaaacacgctggatacgcgtaccattcgcggacttggcttaatctcccgccattcattgggtatatacggattccacgccttgattatccatgcgctgcgcacccggggaattgagcttaaaaattggccaatactggatattatttggatcttttgcgcgacgttggcagcgagtttgttactttctatgctggtacaacgaatcgacagaaacagattagtgagttaagtaaaagcccggtcacattggactgaccgggcttacgtgagttattcgctgtattcttcctgggtaacctgtgtttcttttggtgggtttattccggcatcacgaatatttttctgcaccgctactgcaccaaacaagcttaagaagaaagccagtccataaaaacctttttcgctgagtaataatgtcgcattccacagacctaccatcagtaatgcaacagagataataaagacagtcaggcaggtcatataataaatggaagtggtcggtatgccttcatacttgtcccgaacggtcttttgataagacgccgcagaaaacagtcctaataccagtacggcaaaataatatcctttttcatttaactgcatctctgcattccatagccctaacagataggtaacgataccaccaacgagagctatccatgacacaatactaaaggccggtgaataggttgatattttgttgtccatcacagtattcctttcattcctgaatatgtaagagctttatgttgctcatgccgagcgaaacaaacgcatttgaccaaacaagcagacaaaaaaggcgatgggatagatcaccatttcataagtattgataggtgcgtttaaaacaccgataaacaagagaccgatagtgattaacgcaactaactggcagatatgggtaaaaaaatcatccagttgcccgagtttttctgcgcgaagatatgcatagttgccaaaagttgctgtcattaacacgccaagaaaatagccttttccacttaacaatgggcatgagatccatagcccaaccagataaaccagcgccccgacaacaaataatagttttgccacagtctttgaggttttcataacgatctccatatctaccagcgatacattacgagtaaccaacgaaagacaaaactgaaaaatgccattaacaaatgattttcagaataaattcatactaaatattaattaattactgagatatatagatgtgaattatcccccacccggtcaggcaggggataacgtttacgccattaatggcagaagttgctgatagaggcgacggaacgtttctcgtcgtggctgataagcggcataacgctgcgcatctggtagatgcgactgttctaacggtagttgcggcaacaattcaatgagcgatttctctggattcgccgcgatctgcgccagccttgctgcgcccagtgctggccccacatccccccccgtacggtaatcgagctgctgaccgctgatatccgccagcatctgacgccagtactcactacgcgccccgcccccaatcaacgtaacactttgcggtttaataccgcaggcatgcacgacatccatgccatctgccagcgcataacccacgccttccagcactgctcgcgccagttcattggggccatgttgatgagtcaaaccaaagaaaacccccttcgcctggggattattgtgtggcgtacgctcgccggaaagataaggcagaaaccaaactggctcggcactttcatcagcctgttgagctgcagcgattaaagctgggacattgctcaggccggttaatttcgcggcccaatccagacacgacgctgcactcagcatcacagacattaaatgccaacgttgcggtagcgcatggcaaaagctatgtacggcgctttctggcttgcttaagaacccttcgctgacagcaaaatagacccccgacgtccccagcgataacattgcctgattagcatcaaccattcccacaccaactgcaccagctgcattgtcgccaccgcctgcgacaactggcaccgtcgccataccccacgctttcgcaacttcaggtaacaaagcaccagtaatttcgctgccttcgtataatgcgggcatctggtcacgagataagtcgcaagcctgcagcatgacgtcactccagtcacgctttgcgacatccagccacatggtgccagctgcgtcagacatatcgctggcaaactcccccgtcatacgcagacgcaagtaatctttcggtaataatactttgtcgatttgacggaatatctccggctcatgccgctgaacccatagcaatttaggcgcagtaaatccgggcatcatcaggttgccggtaatcacccgcgattgcggaactcgcgcttccagcaaagtgcactcttgcgcacagcgcccgtcgttccacaaaatggcagggcgtaacacccgttgctgagcatccagcaaggttgctccgtgcatctggccggcaatacccaatgctttaacgtcctgcagagaatgctgatcgcccagagctttcattgcgcgatcagttgcctgccaccactgttccgggtcttgttccgaccagagtggatgcgggcgcgaaacggtcagcttttccgtttgcgcagcaaccacctcaccctgctcgttgagcaaaataacttttacgcccgaggtgccaagatctatcccgatatacatatcgatcgttccttaaaaaaatgcccggtatcgctaccgataaccgggccaacggactgcacagttagccgttatttgtcgaacagataatggtttaccagattttccagttgttcctggcgaccactctgatgcaccggagacaaatgatgttcctgagcatatttggctaaatctgccagtgacatttggcctttcaggatttgctggcccaattcgctattccagccggaataacgctgcgcgatgcgtttatccagctcgccatcttcaatcatgcgcgctgcaattttcagcgccagtgccatcgtatccatcgcgccgatatgaccgtaaaacagatcatatttatcagtactttgacgacgtactttggcatcgaagttcagaccaccggtggtgaaaccgcctgctttgagaatttcatacatcaccagcgcattctcttccacactgttcgggaactggtcggtgtcccagcccagttgcgcatcgccacggttggcgtcgacagaaccgaacaggccaagcgcaatggcggtggctatttcatgatggaaagagtgacctgccagcgtcgcgtggttagcttcaatgttcagtttaatctctttttccagaccaaactgtttcaggaagccatagaccgtcgcggcatcgtaatcatattgatgtttggtcggttcttgcggtttcggttcgataagcaacgtgccctggaaaccgattttatgtttatgctcaaccaccatctgcataaagcggcccagttgttcacgctcctgacgcaagtcggtatttaacagcgtttcgtaaccttcacgaccgccccacaggacatagttttcaccgcccaatttatgggttgcttccatcgctgtaacaacttgcgttgccgcccagctgaagacttcaggatctgggttcgtcgccgcacccgcgccgtagcgagggtttgtaaagcagttggcggttccccacagcagcttcacgccgctctcttcttgcttgcctgccaggacatcaaccatttgcgcaaaattattgatgtactcttttaacgacgcgccctcaggggaaacatccacatcgtggaagcaataaaatggcacatgtaacttgtggaaaaactcaaatgcgacatctgctttacgcttcgccaacgccagtgcctcaccaggctgctgccacggacgattaaacgcccccacaccaaacatatccgccccgttccagcagaaggtgtgccagtagcaggcggcaaaacgcaagtgctcttccatacgcttacccaacaccagttcgtcgggattgtagtgacggaatgctaacgggtttgaggattttgagccttcataacgaacgcgatcgagctggtcaaaataggcttgcatattgaactccataatcaggtaatgccgcgggtgatggatgatgtcgtaatattgggcactccctttcagttgctcaattatgttatttcacactgctattgagataattcacaagtgtgcgctcgctcgcaaaataaaatggaatgatgaaactgggtaattcctcgaagagaaaaatgcaataagtacaattgcgcaacaaaagtaagatctcggtcataaatcaagaaataaaccaaaaatcgtaatcgaaagataaaaatctgtaattgttttcccctgtttagttgctaaaaattggttacgtttatcgcggtgattgttacttattaaaactgtcctctaactacagaaggccctacaccatgaaaataaagaacattctactcaccctttgcacctcactcctgcttaccaacgttgctgcacacgccaaagaagtcaaaataggtatggcgattgatgatctccgtcttgaacgctggcaaaaagatcgagatatctttgtgaaaaaggcagaatctctcggcgcgaaagtatttgtacagtctgcaaatggcaatgaagaaacacaaatgtcgcagattgaaaacatgataaaccggggtgtcgatgttcttgtcattattccgtataacggtcaggtattaagtaacgttgtaaaagaagccaaacaagaaggcattaaagtattagcttacgaccgtatgattaacgatgcggatatcgatttttatatttctttcgataacgaaaaagtcggtgaactgcaggcaaaagccctggtcgatattgttccgcaaggtaattacttcctgatgggcggctcgccggtagataacaacgccaagctgttccgcgccggacaaatgaaagtgttaaaaccttacgttgattccggaaaaattaaagtcgttggtgaccaatgggttgatggctggttaccggaaaacgcattgaaaattatggaaaacgcgctaaccgccaataataacaaaattgatgctgtagttgcctcaaacgatgccaccgcaggtggggcaattcaggcattaagcgcgcaaggtttatcagggaaagtagcaatctccggccaggatgcggatctcgcaggtattaaacgtattgctgccggtacgcaaactatgacggtgtataaacctattacgttgttggcaaatactgccgcagaaattgccgttgagttgggcaatggtcaggaaccaaaagcagataccacactgaataatggcctgaaagatgtcccctcccgcctcctgacaccgatcgatgtgaataaaaacaacatcaaagatacggtaattaaagacggattccacaaagagagcgagctgtaagcgttacgccccagcgcggagcgggggcgtgatttctctccatgccgcgtgaatgaattggcttaggtggagtcgttatgccttatctacttgaaatgaagaacattaccaaaaccttcggcagtgtgaaggcgattgataacgtctgcttgcggttgaatgctggcgaaatcgtctcactttgtggggaaaatgggtctggtaaatcaacgctgatgaaagtgctgtgtggtatttatccccatggctcctacgaaggcgaaattatttttgcgggagaagagattcaggcgagtcacatccgcgataccgaacgcaaaggtatcgccatcattcatcaggaattggccctggtgaaagaattgaccgtgctggaaaatatcttcctgggtaacgaaataacccacaatggcattatggattatgacctgatgacgctacgctgtcagaagctgctcgcacaggtcagtttatccatttcacctgatacccgcgttggcgatttagggcttgggcaacaacaactggttgaaattgccaaggcacttaataaacaggtgcgcttgttaattctcgatgaaccgacagcctcattaactgagcaggaaacgtcggttttactggatattattcgcgatctacaacagcacggtatcgcctgtatttatatttcgcacaaactcaacgaaatcaaagcgatttccgatacgatttgcgttattcgcgacggacagcacattggtacgcgtgatgctgccggaatgagtgaagacgatattatcaccatgatggtcgggcgagagttaaccgcgctttaccctaatgaaccacataccaccggagatgaaatattacgtattgaacatctgacggcatggcatccggttaatcgtcatattaaacgagttaatgatgtctcgttttccctgaaacgtggcgaaatattgggtattgccggactcgttggtgccggacgtaccgagaccattcagtgcctgtttggtgtgtggcccggacaatgggaaggaaaaatttatattgatggcaaacaggtagatattcgtaactgtcagcaagccatcgcccaggggattgcgatggtccccgaagacagaaagcgcgacggcatcgttccggtaatggcggttggtaaaaatattaccctcgccgcactcaataaatttaccggtggcattagccagcttgatgacgcggcagagcaaaaatgtattctggaatcaatccagcaactcaaagttaaaacgtcgtcccccgaccttgctattggacgtttgagcggcggcaatcagcaaaaagcgatcctcgctcgctgtctgttacttaacccgcgcattctcattcttgatgaacccaccaggggtatcgatattggcgcgaaatacgagatctacaaattaattaaccaactcgtccagcagggtattgccgttattgtcatctcttccgaattacctgaagtgctcggccttagcgatcgtgtactggtgatgcatgaagggaaactaaaagccaacctgataaatcataacctgactcaggagcaggtgatggaagccgcattgaggagcgaacatcatgtcgaaaagcaatccgtctgaagtgaaattggccgtaccgacatccggtggcttctccgggctgaaatcactgaatttgcaggtcttcgtgatgattgcagctatcatcgcaatcatgctgttctttacctggaccaccgatggtgcctacttaagcgcccgtaacgtctccaacctgttacgccagaccgcgattaccggcatcctcgcggtaggaatggtgttcgtcataatttctgctgaaatcgacctttccgtcggctcaatgatggggctgttaggtggcgtcgcggcgatttgtgacgtctggttaggctggcctttgccacttaccatcattgtgacgctggttctgggactgcttctcggtgcctggaacggatggtgggtcgcgtaccgtaaagtcccttcatttattgtcaccctcgcgggcatgttggcatttcgcggcatactcattggcatcaccaacggcacgactgtatcccccaccagcgccgcgatgtcacaaattgggcaaagctatctccccgccagtaccggcttcatcattggcgcgcttggcttaatggcttttgttggttggcaatggcgcggaagaatgcgccgtcaggctttgggtttacagtctccggcctctaccgcagtagtcggtcgccaggctttaaccgctatcatcgtattaggcgcaatctggctgttgaatgattaccgtggcgttcccactcctgttctgctgctgacgttgctgttactcggcggaatgtttatggcaacgcggacggcatttggacgacgcatttatgccatcggcggcaatctggaagcagcacgtctctccgggattaacgttgaacgcaccaaacttgccgtgttcgcgattaacggattaatggtagccatcgccggattaatccttagttctcgacttggcgctggttcaccttctgcgggaaatatcgccgaactggacgcaattgcagcatgcgtgattggcggcaccagcctggctggcggtgtgggaagcgttgccggagcagtaatgggggcatttatcatggcttcactggataacggcatgagtatgatggatgtaccgaccttctggcagtatatcgttaaaggtgcgattctgttgctggcagtatggatggactccgcaaccaaacgccgttcttgattttgataaaaattttctcaaagccggttacgtattaccggttttgagtttttgcatgattcagcaggaaaagaaccatgtttactaaacgtcaccgcatcacattactgttcaatgccaataaagcctatgaccggcaggtagtagaaggcgtaggggaatatttacaggcgtcacaatcggaatgggatattttcattgaagaagatttccgcgcccgcattgataaaatcaaggactggttaggagatggcgtcattgccgacttcgacgacaaacagatcgagcaagcgctggctgatgtcgacgtccccattgttggggttggcggctcgtatcaccttgcagaaagttacccacccgttcattacattgccaccgataactatgcgctggttgaaagcgcatttttgcatttaaaagagaaaggcgttaaccgctttgctttttatggtcttccggaatcaagcggcaaacgttgggccactgagcgcgaatatgcatttcgtcagcttgtcgccgaagaaaagtatcgcggagtggtttatcaggggttagaaaccgcgccagagaactggcaacacgcgcaaaatcggctggcagactggctacaaacgctaccaccgcaaaccgggattattgccgttactgacgcccgagcgcggcatattctgcaagtatgtgaacatctacatattcccgtaccggaaaaattatgcgtgattggcatcgataacgaagaactgacccgctatctgtcgcgtgtcgccctttcttcggtcgctcagggcgcgcggcaaatgggctatcaggcggcaaaactgttgcatcgattattagataaagaagaaatgccgctacagcgaattttggtcccaccagttcgcgtcattgaacggcgctcaacagattatcgctcgctgaccgatcccgccgttattcaggccatgcattacattcgtaatcacgcctgtaaagggattaaagtggatcaggtactggatgcggtcgggatctcgcgctccaatcttgagaagcgttttaaagaagaggtgggtgaaaccatccatgccatgattcatgccgagaagctggagaaagcgcgcagtctgctgatttcaaccaccttgtcgatcaatgagatatcgcaaatgtgcggttatccatcgctgcaatatttctactctgtttttaaaaaagcatatgacacgacgccaaaagagtatcgcgatgtaaatagcgaggtcatgttgtagcgatgatgagaattgtcggcgtcacatcaggtaacgctgcgtggttgtcggatgcggcgtgaacgccttatccgacctacccgccaggcatgataaaacgcaccaacaacgcttcaggctcgtagctcaactgcctgagacaaagtaaaaagccttatccgactgacaagtcggataaggctcaaggaaatgcaattacatatgcgccgcgattaaccgttggttatcctggtacattgcgaacaggtagttgttataactcttccctttggtcgagtagcccttcagcttgtgaatcatcgctgtggcagtcacttcctgatccgctttacgcagctgcgcacgcgatttacggaacgaagagtaagccgggtgcgtattcaggttagtgacataggcgctcaccgattctttgacagaactaaactgtgagtaccctttcactttacctggcgcattggtacaacgtcctttcatgcatttcatgccgaacaggttgttgttgttgcgcgccagcttcgacgttccccaaccgctttctgctgcagccatcgtcgccaccatactggtggggataatgtctacgcgttcaagcaaggtattccacgggatttttcgcgtattaccggaccacttcaccttgtagcgtttggcgatgtctttcagacgcgcacgctcagcaggtgaccattggccctgatactgttttgaaatgagccagttacgttccgcagtaatggccgcattttggctggtaatgtaaggcattacggtccggagaaacgcctttttccttggtgttccggaagggtattttcgcaaatcaggaagtgaactactctttgcactattgcgagaatactcttgtttactgcttacctgtttattactagctttagttaagtgggacttttgactcgctgttgttgtgtgcgtcttcgctaacacctcactcgaaaacaccagagtgagtaacataagaatcatcgccccatatcgtcgtatgggagtcaaaatcatcaggtctcctggtcggatttaatcattccaacaccttatatttttcacaaatttgagagttgaatctcaaatcatatcaaaaatagctgtcaagagcaccccaaggaatagtccaaatctgaaactatgtcacgtgttaacgattcagattggcgctaaatcgcagaaaatgtgggggttatcgcaaaattcagccgttttttgcgcgagatcgctcacccttgcttctcatcctgtggacttaccgctcagggatgagttttgtttggcttatcgctggcaaactgtctgaaatcgcagcaataaggactcatccgccatgaaactcgccgcctgttttctgacactccttcctggcttcgccgttgccgccagctggacttctccggggtttcccgcctttagcgaacaggggacaggaacatttgtcagccacgcgcagttgcccaaaggtacgcgtccactaacgctaaattttgaccaacagtgctggcagcctgcggatgcgataaaactcaatcagatgctttccctgcaaccttgtagcaacacgccgcctcaatggcgattgttcagggacggcgaatatacgctgcaaatagacacccgctccggtacgccaacattgatgatttccatccagaacgccgccgaaccggtagcaagcctggtccgtgaatgcccgaaatgggatggattaccgctcacagtggatgtcagcgccactttcccggaaggagccgccgtacgggattattacagccagcaaattgcgatagtgaagaacggtcaaataatgttacaacccgctgccaccagcaacggtttactcctgctggaacgggcagaaactgacacatccgcccctttcgactggcataacgccacggtttactttgtgctgacagatcgtttcgaaaacggcgatcccagtaatgaccagagttacggacgtcataaagacggtatggcggaaattggcacttttcacggcggcgatttacgcggcctgaccaacaaactggattacctccagcagttgggcgttaatgctttatggataagcgccccatttgagcaaattcacggctgggtcggcggcggtacaaaaggcgatttcccgcattatgcctaccacggttattacacacaggactggacgaatcttgatgccaatatgggcaacgaagccgatctacggacgctggttgatagcgcacatcagcgcggtattcgtattctctttgatgtcgtgatgaaccacaccggctatgccacgctggcggatatgcaggagtatcagtttggcgcgttatatctttctggtgacgaagtgaaaaaatcgctgggtgaacgctggagcgactggaaacctgccgccgggcaaacctggcatagctttaacgattacattaatttcagcgacaaaacaggctgggataaatggtggggaaaaaactggatcagaacggatatcggcgattacgacaatcctggattcgacgatctcactatgtcgctagcctttttgccggatatcaaaaccgaatcaactaccgcttctggtctgccggtgttctataaaaacaaaatggatacccacgccaaagccattgacggctatacgccgcgcgattacttaacccactggttaagtcagtgggtccgcgactatgggattgatggttttcgggtcgataccgccaaacatgttgagttgcccgcctggcagcaactgaaaaccgaagccagcgccgcgcttcgcgaatggaaaaaagctaaccccgacaaagcattagatgacaaacctttctggatgaccggtgaagcctggggccacggcgtgatgcaaagtgactactatcgccacggcttcgatgcgatgatcaatttcgattatcaggagcaggcggcgaaagcagtcgactgtctggcgcagatggatacgacctggcagcaaatggcggagaaattgcagggtttcaacgtgttgagctacctctcgtcgcatgatacccgcctgttccgtgaagggggcgacaaagcagcagagttattactattagcgccaggcgcggtacaaatcttttatggtgatgaatcctcgcgtccgttcggtcctacaggttctgatccgctgcaaggtacacgttcggatatgaactggcaggatgttagcggtaaatctgccgccagcgtcgcgcactggcagaaaatcagccagttccgcgcccgccatcccgcaattggcgcgggcaaacaaacgacacttttgctgaagcagggctacggctttgttcgtgagcatggcgacgataaagtgctggtcgtctgggcagggcaacagtaacttttccggcttcccgttcgtcagtacctcgggaagccgccaaccaggataaaatgtcagccctaatcagcgttgcaggataaagcaccgctcactcttcaacagaccgatttgcaccccagcaaatgtagcgttattgttaccttccttgctacagagttcgacagatatcccgctatgacattctccctttttggtgacaaatttacccgccactccggcattacgctgttgatggaagatctgaacgacggtttacgcacgcctggcgcgattatgctcggcggcggtaatccggcgcagatcccggaaatgcaggactacttccagacgctactgaccgacatgctggaaagtggcaaagcgactgatgcactgtgtaactacgacggtccacaggggaaaacggagctactcacactgcttgccggaatgctgcgcgagaagttgggttgggatatcgaaccacagaatattgcactaacaaacggcagccagagcgcgtttttctacttatttaacctgtttgccggacgccgtgccgatggtcgggtcaaaaaagtgctgttcccgcttgcaccggaatacattggctattctgacgccggactggaagaagatctgtttgtctctgcgcgtccgaatattgaactgctgccggaaggccagtttaaataccacgtcgattttgagcatctgcatattggcgaagaaaccgggatgatttgcgtctcccggccgacgaatccaacaggcaatgtgattactgacgaagagttgctgaagcttgacgcgctggcgaatcaacacggcattccgctggtgattgataacgcttatggcgtcccgttcccgggtatcatcttcagtgaagcgcgcccgctatggaatccgaatatcgtgctgtgcatgagtctttccaagctgggtctacctggctcccgctgcggcattatcatcgccaatgaaaaaatcatcaccgccatcaccaatatgaacggcattatcagcctggcacctggcggtattggtccggcgatgatgtgtgaaatgattaagcgtaacgatctgctgcgcctgtctgaaacagtcatcaaaccgttttactaccagcgtgttcaggaaactatcgccatcattcgccgctatttaccggaaaatcgctgcctgattcataaaccggaaggagccattttcctctggctatggtttaaggatttgcccattacgaccgagcagctctatcagcgcctgaaagcacgcggcgtgctgatggtgccggggcacaacttcttcccagggctggataaaccgtggccgcatacgcatcaatgtatgcgcatgaactacgtaccagagccggagaaaattgaggcgggggtgaagattctggcggaagagatagaaagagcctgggctgaaagtcactaaaaattgcctgatgcgctacgcttatcaggcctacatgatttctgcaatatattgaatttggaagaatttgtaggccggataaggcgtttacgccgcatctggcataaacaaagcgcactgttccggcgttgagaaacgccggaaaacgtttcaaacaggctgctgccgtagccgatgccgctgcactttctcgacatccatgcactgcaacgcctttgtcgggcaggcttcaacacaggccggtcccgtctcccgatgccagcacagatcgcacttaatcgccctcgcctttttgcgcgaagaaacgacctccatcgcaccaaacgggcaagccagcatacagcttttacagccaatgcaacgtgtttgttcaacgaaaatatgcccatgttcgcggcttatcgcgtcaacagggcagacattcgcgcacggtgcatcttcacactgatgacaggctactgccgtggtccagcagtggtctttaatgacacgaatacgggaaataaactcgtctggtgacaacgcagcgcaatcctgattctcatgatgcgacactgcgcaagccacttcacaggtacggcaaccgatacatttcgtcgcatccgcaataataaaccggttcatgatcactcctttgcactaaaacagcagagtgccagagagcgcgtccctactgctttgatccaacgaaggaaatgttaaagttttggcacttgtccaaagcgttatgtgatcgcgcccaggtcatccctgacagtaaatcccagttcattagaaatagcctgcgcggtttcacgcagtggtttcaggagatttttctctcccacctgtttcagacgtgatgtcgaaagcgaaatcgacacggcgtacggcacccgcccatgaatatcaaacaccggaacagcaatacaggagacgccgagttcgttttcttctctgtccatcgccgctccgctttcacgaatgtgcgccagttcgtcgaacatcgcgggcagctcggtaatggtattgcgggttaacggctggatctcatgctgatggctttcccagtatgacttcacgtagtccgggtgaccaaacgccatgtagatcttgcccattgcggaacagtagagcggcatatgctggccaatataggcacgggttcgcagcatcccggttgtgggttccagcttataaatcaaaatagcgtgatcgtcttcgcggctggagaagttaatggtttcaccagtggcgatgttcagtgcctcaagatgcggagcggcgatatgaatgatattcagcgaagacagcgccttctgcccgacggcaataaatttggtggtcaggcgataactccctgcggcaggcgcggtggtcacatagccgcaggactgtaatccctgcaataagcgatggacggtactcttatttaaaccagccagctccgaaagatgcgccaacggacaaccgtttggatagttgctcaaaatctcaatcagcatcaacccgcgaaacagactctggcttccggctggacgctctttttcctgcgccatctcgttctctttttttcccatcacttctttccccattttgtcgcgtcctgatggtagcgcaaagtgtgccgtagttcacgatctcgacagataatttataaccaattgatttttatgtcttttgaaattcatcaatcagattgctttgttaaaaagtgatcgatatatttgaaatcaagtttcgcatattgaaattttaagccaaaaaagcgatcaaaaaaacaaggaagcctgggatgaaagtgacatttgagcagttaaaagcagcctttaatcgggtcttaatttcacgcggcgttgacagcgaaacggctgacgcctgtgcagagatgttcgcccgcaccaccgaatccggcgtttattctcacggcgttaatcgtttccctcgtttcattcaacaactggaaaacggcgatatcattcctgatgcccaacccaaacgtataaccagcctcggcgcaattgaacagtgggacgcccagcgttcgatcggtaacctgacagcgaaaaagatgatggatcgcgccattgaactggctgccgatcacggtattggtctggtggcactacgtaatgccaaccactggatgcgcggcggcagctacggctggcaggcggcggaaaaaggctatattggcatttgctggaccaactccatcgccgtaatgccgccgtggggcgcaaaagagtgtcgcatcggcactaacccgctgatcgtcgccattccttccacgccgatcaccatggtcgatatgtcgatgtcgatgttctcttacggcatgttagaagttaaccgtctggcaggtcgtcagctcccggtcgatggtggctttgatgatgagggcaatttgaccaaagaacctggcgttatcgagaagaatcgccgcattttgccgatgggctactggaaaggttctggcatgtcgattgtgctggatatgatcgctactctcctttccgacggcgcatccgttgccgaagtcacccaggacaacagcgacgaatacggcatttcacaaatttttattgccattgaagtggacaagcttatcgacggtcccacccgcgatgccaagctgcaacgcatcatggattacgttactagtgccgagcgtgctgacgaaaatcaggccattcgcttacccggccatgaatttactaccctgctggccgaaaaccgccgtaacggcatcactgttgatgacagcgtgtgggccaaaatccaggcgttatgaggagataagtcatgatttttggacatatcgcgcagcccaatccgtgccgtttgcccgccgccattgaaaaggcgctcgattttctgcgcgctaccgatttcaacgccctggagccgggcgttgtcgaaatcgacggcaaaaatatttatacgcaaattatcgatttaaccacacgcgaagcggtggtaaaccgtccggaagtgcatcgtcggtatatcgatattcagtttctggcgtggggcgaagagaaaatcggcattgctattgatacgggaaataataaagtcagcgaatcactattagagcagcgcaatattattttttatcacgacagtgaacatgaatcatttatagaaatgataccgggcagctacgcaattttctttccgcaggatgttcaccgaccaggttgtattatgcaaacagcctctgagatacgaaaaattgtggttaaagtcgcattaacggcgctgaattaatcgaataatcgtctacgccagaacgcctgggtaatgttattgctctaactatattaataattcaggttgctgcacatgcgacttgaattatgacagacatagcctcaaggaatagctatgaaaaaaatactcgaagcaatactggcgattaatctcgccgtactttcctgtattgtatttataaacattattttaagatatggttttcagacaagcattttatctgttgatgaattgtcacgttatttatttgtctggttaacgtttattggcgcgattgtagcttttatggataacgcccacgttcaggtcacctttctggtggagaaactctcccccgcatggcagcgacgagtcgctctggttacccattccttaatcttatttatttgtggcgcactggcctggggcgcaacgctaaaaacaattcaggactggagcgattattcaccgatcctcggtttacccatcggcctgatgtatgccgcttgtctgcccaccagcctcgttatcgcattctttgaactgcgtcatttatatcaactcatcacgcgtagcaattctctaacgtcgccaccgcaaggagcttaatcatggctgtgctgatttttctgggctgtctgttgggtggtattgctatcggtttgcctattgcctgggcactgttgttgtgcggggcggcgttaatgttctggctggacatgtttgatgtccagatcatggcacaaacgctggtgaacggagccgatagcttctccctgctggcgattccgttctttgtgctggcgggtgaaatcatgaatgcgggcggcttgtcaaaacgcattgttgacctgccgatgaaactggtggggcataaaccaggcgggctgggctacgtcggcgtgctggcagctatgattatggcgagcctttctggttctgccgttgcggataccgccgccgttgccgctctactggtgccgatgatgcgcagcgccaactatccggtcaaccgggcggcggggctgattgcctctggcggcattatcgcgccaattattcccccttccattccgtttattatcttcggcgtttccagcggattatccatcagtaagctgtttatggcgggcattgcccctggcatgatgatgggcgcaacgctgatgcttacctggtggtggcaggccagtcgccttaatttaccccgccagcaaaaagcaacgatgcaggaaatctggcactcttttgtctccggtatctgggcgctgtttcttccagtcatcattattggcgggtttcgctccggtctgtttacccctaccgaagccggggccgttgctgctttctatgcgctgtttgtcgccacagttatttaccgtgaaatgaccttcgccacactttggcatgtactcattggcgcggcgaaaaccacctcagtggttatgtttctggtggcctcggcacaagtttccgcctggctgattaccattgctgaactgccgatgatggtttctgatttactgcaaccgttggtcgattcaccgcgtctgctgtttatcgtcattatggtggctatcctgattgtcggcatggtcatggatttaacgccgacggtattaattcttaccccggtattaatgcctttagttaaagaggcaggaatcgatccgatttatttcggtgtcatgtttatcattaactgctcaatcggcttaattacaccacctatcggtaatgtacttaacgttatttcaggggtggcaaaactcaaattcgatgatgcagtcagaggcgttttcccttacgtcctcgttttatattccttattagtcgtatttgtttttattcccgatctcatcatcctccctttgaaatggattaattaaaaggaaaatattatgaaattacgctctgtaacctacgcattattcattgctggcctggctgcattcagcacatcttctctggcggcacaatctttacgtttcggttatgaaacatcacaaaccgactcgcaacatattgcggcgaaaaaattcaatgatttattgcaggagagaaccaaaggcgagctgaaattaaaactgttcccggacagcactctcggtaacgcgcaggcgatgatcagcggcgtacgtggcggcaccatcgatatggaaatgtccggctcgaataactttgccgggttatcaccagtgatgaacttgcttgatgtccctttcctgttccgcgataccgctcacgcgcataaaacgctcgacggcaaagtcggtgatgatctgaaagcctcacttgaaggtaaaggactgaaagtactggcctactgggaaaacggctggcgcgatgtcaccaactcgcgcgcaccggttaaaacccccgccgacctgaaagggctgaaaatccgcaccaacaatagcccgatgaatatcgccgcattcaaagtctttggcgctaacccgatcccgatgccgtttgccgaagtctataccgggctggaaacccgcactatcgacgctcaggaacacccgatcaacgtcgtctggtcagcaaaatttttcgaagtgcagaagttcctttctctgacgcaccacgcctattccccgcttctggtggtgatcaacaaagcgaagtttgatggcttaagtccggagttccagcaggcgctagtttcatctgcacaagaagcgggtaactatcagcgcaaactggttgctgaagatcagcaaaaaatcatcgacggcatgaaagaagcgggcgtggaagtcatcaccgatctcgaccgcaaagcctttagcgacgcactggggaatcaggttcgcgacatgtttgttaaagatgtgccgcagggagctgatctgctgaaagccgtggatgaggtgcaataaaccatgacgcaatactggctggggttagattgtggcggtagctggctgaaagccgggctgtatgaccgcgaaggccgggaggcaggcgtgcagcgcctgccgctgtgcgcattaagcccgcagccaggctgggcagagcgcgatatggcagaactgtggcaatgctgcatggctgtcattcgcgccctgcttactcattctggtgttagcggggaacaaattgtcggtatcggcatctccgcacagggaaagggcttgtttttgctggataaaaacgacaaaccgctcgggaatgctattttgtcctcggaccgccgggcgatggaaatcgttcgtcgctggcaggaagatggcatcccggaaaaactctacccgctgacccgacaaaccttgtggaccgggcatccggtgtcgctgttacgctggctgaaagagcacgaaccagaacgctacgcgcaaattggctgcgtgatgatgacgcacgactacctgcgctggtgtttaactggcgtcaaaggctgtgaagagagcaatatttccgagtccaacctctacaacatgagccttggggaatatgacccgtgcctcaccgactggctggggatcgctgaaatcaatcacgccctgccgcctgttgtcggatctcccgaaatctgcggggagatcaccgctcagatagccgtactgaccggtctgaaagcgggtacgcccgttgtcggcggcctgtttgatgtggtttccaccgcactctgcgccgggatcgaagacgaatttacccttaatgcggtgatgggcacctgggcggtgaccagcggcataacccgcggtttacgtgacggtgaagcgcatccgtatgtctatggtcgctacgttaacgatggtgaatttatcgttcacgaagccagccccacctcttccggcaacctcgaatggtttaccgcacagtggggagaaatctcgtttgatgagatcaaccaggccgttgccagcttgccgaaggccggtggcgatctctttttcctgccgttcctgtacggcagcaacgccggactcgagatgaccagcggtttctacgggatgcaggccattcacacccgcgcgcacctgttgcaggccatctatgaaggggtggtgttcagccatatgacccacctcaaccgaatgcgcgaacgttttactgatgttcacaccctacgcgtcactggcggcccggcgcactccgatgtctggatgcaaatgctggcggacgtcagcggtctgcgtattgagctgccgcaggtggaagaaaccggctgctttggtgcagcacttgccgcccgcgtcggcaccggggtttatcgcgatttcagcgaagcccagcgtgatttacagcacccggtgcgcaccctgctgccggatatgactgtccatcagctttaccaacaaaaataccaacgctatcagcatctcattgccgcacttcagggctttcacgcccgcatcaaggagcacatattatgagccgaccacttctgcaactggcactcgaccactcatcacttgaagccgcacagcgcgacgtgacgcagttaaaagacagcgtcgatattgtcgaagcgggcaccattctctgtttaaacgaagggcttggcgcggtgaaagccttgcgcgaacagtgccctgacaaaatcatcgttgccgactggaaggtcgccgacgctggtgaaacgctcgcgcaacaggcatttggcgcaggcgctaactggatgaccatcatctgcgccgcaccgctcgcgacggtggaaaaaggccacgcgatggcgcaacgctgcggtggtgaaattcagatcgagctgttcggtaactggacgctggacgacgcccgcgactggcatcgtattggcgtgcggcaggcgatttatcatcgcggtcgtgatgcacaggccagcgggcaacagtggggcgaagccgatctggcacgcatgaaggcgctttccgatatcggccttgagctttccattaccggcgggattacccctgctgacctgccgctgtttaaagatattcgcgtgaaagcgtttattgccgggcgagcactggcaggctcagcaaatccggcgcaggtggctggcgatttccatgcgcaaatcgacgctatctggggaggcaagcgtgcgtaatcatccgttagggatttatgaaaaggcgctggcgaaagatctctcctggccggagcggctggtgctggcaaaaagctgcggttttgattttgtcgaaatgtcggtggatgaaaccgacgaacggctttcacgtcttgactggagcaccgcacaaaggacttcgctggttgccgcgatgatcgaaacgggtgttgggatcccgtcgatgtgcctgtccgcacatcgtcgctttccttttggtagccgtgacgacgcggtacgccagcgagcacgggagatcatgagcaaagcgattcgtctggcacgcgatctcggcatacgcaccatccagctggcgggctacgacgtctattacgaagaccacgatgaaggcacccggcaacgttttgctgaagggctggcgtgggcggtcgaacaggcggcggcatcacaagtcatgctagcggtggagattatggacaccgcgtttatgaactccatcagtaaatggaaaaagtgggacgagatgctcgcctcgccgtggttcaccgtctacccggacgtcggcaacctcagcgcctggggcaatgatgttcccgccgaactgaaactgggcattgaccgtatcgccgcgatccacctgaaagacacccagccagttaccgagcaaagtcccggacagttccgcgacgtgccgtttggcgaaggctgcgtcgatttcgttggcatcttcaaaacgctgcataaactgaactatcgcggttctttcctgattgagatgtggaccgaaaaagccaaagagccggtgctggagattattcaggcgcggcgttggattgaagcgcgtatgcaggaggctggatttatatgttagagcaactgaaagccgacgtgctggcggcaaatctggcgcttcccgctcaccatctggtgacgttcacctggggcaatgtcagcgcggtagacgacacgcggcaatggatggtaatcaaaccttccggcgtcgaatacgacgtgatgaccgccgacgatatggtggtggttgagatagccagcggtaaggcggtggaaggcagcaaaaagccctcttccgatacgccaacgcatctggcgctctaccgtcgctatgcagagatcggtggcattgtgcatacccactcgcgccacgcgaccatctggtcacaggccgggctggatctccccgcctggggcaccacccacgccgattatttttacggtgccatcccctgcacgcgacagatgaccgcagaggagattaacggcgaatatgaatatcagaccggcgaagtgatcattgaaaccttcgaagaacgtggcaggagtccggcacaaatcccggcggtgctggtgcattctcatggcccgttcgcatggggtaaaaacgccgccgatgccgtgcataacgccgtagtactcgaagaatgcgcctatatgggcctattctcgcgccagcttgcgccgcagctccctgcgatgcaaaacgaactgctggataagcactacctgcgtaagcatggggccaatgcctattacgggcagtaatccctcacgccggggcttcatcgccccggcactacgaattgatatgttccttgctgtaacgccgcttccacgctgctggcgttaaaccggtgtgcttgcgaaaaatctgccggaaatagccaacgtcattaaacccgcacaacgcagccacttcagtgagcgatcgcgcttcgctaattaacagcttttcggcttcgcgcactcgctggcgatggattgcttctgttaacgtcagatgaaacacccgccggtagacgcgcccaagataatcggcattgcagtacagctcgcgggctaaaagcgccgtggaaagcgggcgatgatattgcgtgcggatcagtttctgcgctttccaggcaagggtggtgcctgcgccatcggcctgttcatcaagacgcgcgtcacgggtgagctgctgcaaaatcagcagcacaataaactccagcgccggagtgcgttgatgcttttcctgttcgcttaagaactggcgaaacagggccaccagcgcctgcggatcgacaaccttcgtttgttgcggcacgctaagatgagtaagccagcgagggtcgctatccggcgctttaacctcaaaatgcagccagtaaaatttgagatcggcgggaaaatcctccaccccaacatgttgtcgattcggccagagtaataaactctctcccgcatcgaccagaaatatccgttcttcttcctgaatcgttaatcgacctttttcgacaaagataatttcccatgactccagccgccttgcaggatgcctccctacgccgcgggaaataaataatccaccattttgcactttaatcggtaacgtcatggataattcgagcattgatatgtaatttcccgcttattcattaatgattaaacacattaccttttgattattaatcaaaaaaattaatttcacctgatccatttcacacttttaaattcaggtcggaatcgtcacctttttttactcttttctcaccttgttgatattcccgttcacggcagaattaatcaggtcattgcaataaaactaaaaattgcttcctattcacgaggaatatctatgacctctacaccgattactaccgctgatatcgctaaaggtaaaattgacgatgcgttatctgtacgggaaaaaataggctacggcctgggtgacgcaggcggcaccgtaataacttgcctgatcatgaattttctcacctttttctacacagacgtttttggattaactccggcgctggttggcacgctgtttattgcactgcgcgtgtttgatgccatctccgacccggtgatgggcgtcattgccgaccggacgcaaagtcgttgggggcgctttcgtccgtggcagctatggattgccattcccatcggcattatcggcatcctgacgttcaccgtgccagatgccagcatgggagtaaaaatcgcctgggcgttcggtacttacctgctcctttcagtcggttataccgccatcaacgtaccgtactgcgcgctgatcaacaccatgaccacccgccacaatgaagtgatctcctgccagtcctggcgattcgttctctgcggcgtagcgggatttctggtttcggtaggcttaccgtggatggtagatctcttcggtcagggcaacgctgcacgcggctatcaactgggcgtcggcgtattgtgcgccattgccgtggtgatgttcctgtgctgttttttctgggttcgtgaacgggtgccgctctccacaatggggaaatttaccctgcgcgaacatcttgccgggctgcggaacaacgaccaactgctgctgatgctggttatgtctttcctgctgattaacgtctttaatattcgcggcggtgggtatatgtacttcattacctacgtcttacaaggcagtacgggctacacgtcgctgttcttcaccatggtcaccttcgcctccattatcggctcggtgattgtcagcccgttaacgcggcgtttctataccgtcaaaatttactactacaccaatctgctcctcgctgcgctggcggtgttgatgtggttcctgccctccggcccggcttatcaaacgctgtggctggcggtgatcctcggtaatggcgtgattcttggcttcacattgccattgcacttctcattgatggcctttgccgatgactacggcgagtggaaaacccgcgtacgttcttccggcatgaacttcgccttcaatctgtttttcatcaagctggcctgggcctccagcgccgggatcatcagcctgctgtttatttttgtcgcctaccagcctggcgtggaaaaccagaccgccagttcgcttggcgggatcgcggcgatggaaacattactgcctgcgctattccacctgctgctggcaggggcgatccgcttttgcaaactcaataatcctatgatgtcacgcatagctaccgacctgcgtcagcgtcatgtacagccttaaggagcacaagatgaacatttcggaagtcgatctgcgtaaactgacggtcagcgatccgttcctcggtcagtaccaacaactggtccgcgacgtggtgatttcttatcaatgggatgccttgaacgatcgtatcccagaagcggaacccagccatgcgattgaaaactttcgcattgctgccggacttcaggagggtgaattttacgggatggtgtttcaggacagcgacgtcgccaaatggctggaagcggtagcctggtcgctgtgccagaagccggacgccgaactggaaaaaaccgccgacgaggtaatcgaactgatcgcctccgcccaatgtgaagacggctatctcaatacttactttacggtaaaagcacccgaagaacgctggagcaatcttgcggagtgtcatgaactttactgcgccggtcatctgattgaagccggagtcgccttcttccaggccacgggaaaacgacgcttgctggaggtggtttgccgtctggccgatcatatcgaccgcgtatttggtccagatgaaagtaagttacacggttatcctggtcacccggaaattgaactggcactaatgcgcctgtatgaagtgactgaagagccgcgctacctggcgctgacgaactattttgtcgaacagcgtggtgcgcaaccgcactattacgaccaagaatatgaaaagcgcgggcagacatcgcactggcacacctacggcccggcgtggatggtgaaagacaaagcctacagccaggcacatttgtcccttgcgcaacagcaaaccgccatcggtcacgcggtacgttttgtctacctgatgaccggcgtcgcgcatctcgcgcgtttaagtcacgatgacagcaagcgtcaggactgcctgaggctgtggaacaatatggcccagcgtcagttatatattaccggcggcattggctcgcaaagcagcggcgaagcgttcactagcgattacgatctgccgaatgacacggtttacgccgaaagttgtgcttccatcggcctgatgatgttcgcccggcgaatgctggaaatggaaggcgacagtcaatatgccgatgtgatggagcgcgcgctgtacaacaccgtgctcggcggcatggcgctggatggcaaacatttcttctatgtgaatccgctggaagtacatccaaaatcgctgaaattcaaccatatctacgatcacgttaaaccgatccgccagcgttggtttggctgcgcttgttgtccgccaaatatcgcccgcgtgctgacctcgattggtcattatctctacacgccgcgtgaagatgcgttgtatatcaacatatacgcaggaaacagcatggaagtgccggtagaaaatggcacgctgcgcctgcgggttagcgggaactatccgtggcaggagcaggtgacgattgcggttgaatcgccccagccggtacgtcatacgctggctttacgtctgccggactggtgcacacagccgcagatcatattgaatggggaagaggtcgagcaggatattcgtaaagggtatttgcacattacccgcgaatggcaggagggcgatacgctgaatctgactttgccgatgccggtacgccgcgtttacggtaacccgctggtgcgtcacgtcgccggaaaagtggcgattcagcgcggcccgctggtgtattgcctggaacaggccgacaacggcgagtcactgcataatctgtggctgcccaccgatgcgccatttacgacatttgaaggcaagggattgtttagccataagatcttaatccaggcaccgggttaccggtatgaacagagcaatccagagcagcaaccgctgtggcattacgacagcgcgccagccaaacgccagccgcaaactctgacgtttatcccgtggtttagctgggctaaccggggcgaaggcgaaatgcggatctgggtgaatgaggaaaagcatcgccatccggaggttggataaggcgctcgcgccgcatccaacgtagggagcacattgcctgatgcgacgcttaacacgtcttatcaggcatacgagtcggtgcgagagcgtaggccagccgcaccgacatccaccggtgaattaaaaacgccagctcacgccggtgacaaaggtaaaactctcattacgatcaatcatcgggctgtcggtaatctcttccggcagctcgctgtatcctgcgctcgccatcaatacgacgtgctctcctatcgggtattttgccgtcaggctgacatagggcacccaggcatcctgcgcggaataacttgccagaccgctacgacgggactcactctctgaaatgccatagtaatagtcactgaaattctcgtcataatagagaacgcccagcgcaggtgtcagcgacaggcgacctatctgcattttgtggaataccgatagctcccccacccagccgttgctgttatccagaacgtccgcagccgcagaggctttcacggttccccaacgctcgtggtgataccaggcaacccccgctatagccgtactatcacgcttatcaagctgttgcatggcataatcgtcattatcggcagggtcaaattccagcggcatccaggatgcggtcaggctaagttcatttttttcactttgcgacagaataaaacctaatgtggtctgacgaacataaaaagaatcaccttcataactaatcagcggaattgcctttgtattttcattataaccgcgataaggcgattcattataagctgcaccagcaccaatggataattcagaagcagttgcgcttgccataaaaggcaacgcaaataacgccacaatattgcgattaattaacatgtccggtattccattttaaaataagataaaaaagagtcggcataataatgcttacaatttctccggtgcaagattcatatttatatagtaatatataaaattatatataattgggctgttgcgatgacaaaattacaacttaagtaccgggagttaaaaattatctcggtaatcgctgccagtgaaaatatcagccatgccgcgactgtacttggcatcgcacaggccaacgtcagcaaatatcttgctgattttgaatcaaaagtgggtttaaaagtctttgaccgaaccacccggcagctgatgctcacaccttttggcaccgcgctgttaccgtacatcaacgacatgctggacagaaacgagcaacttaataattttattgcagattataagcatgagaaacgtggtcgggtcaccatctacgccccaaccggcataattacctatttatccaaacatgtaatcgataaaattaaagatatcggtgatatcaccttatcgctaaaaacctgcaatcttgagcgtaatgccttttatgaaggcgtcgaatttcctgatgattgtgatgttttaatcagctacgctccaccaaaagatgaatcgctggttgccagttttattacacaatatgccgtaaccgcttatgccagccagcgctatcttgagaaacatcctattagccgtcctgacgaactcgaacatcactcctgtattttgatcgactcgatgatgattgatgacgcgaatatctggcgcttcaacgtcgccgggagtaaagaggtgcgggattatcgcgtgaagggaaattacgtttgcgataacacgcaatcggcgctggagctggcacgaaatcacctggggattgtgtttgcgccagacaaaagtgtgcagagcgatctgcaagacggcacgctggtgccctgctttcagcccccgtatgaatggtggctggatctggtggctatcttccgtaaacgggaataccagccctggcgggtccagtatgtgctggatgaaatgctgcgtgaaattcgccaccagcttgctcagtcgcagcaactgcggcctgaacaagcggcggaaagcgaagattaatgatcgagataaaggtaatgcacccagctggtcatgcgtaatagcactttgcgcatcaccgagacatggatgaaatgatcagagtagaccgccacctgggcgtaaataccgtctggtaaagcgctcaaatcagtgtgctcatccagttcaatggtcgcgataacgccatctgaacccggcgctgtgtttaacgtctgtaaggtgccggtcgactgataagctccgccgggaacagctggactaatggctgccagcttgccgctgaataccttacctggcagagcattaaacaccacttccgcatcgtcgccaggggccagtcgcagcaaggagttctgacggaactgcgccacaatttgtcgtttctgatcgggtataaacaccatcaccggacgtagcggcagcgacgcggcataggtacccggacgaatcagcacctgggtcacataaccatcgctcggcgcacgcactatcgtctgctcaaggttatattttgcttccgcgagctgcgctttcaggctggcgatttgagaatgttcacccaacaccaggctatccagctggctctggatctgtttttgttccgccgccgatgactttacggaggcttcctgcgccagataattttgccgcgccacatcaatatcgcgttctgaaaacgggtttactttcgcctggctgccgcgtgcgtaacgctgatactctttagcgaatttatcccgcgtggcctttgcctgctgagtattcgccgccatctcatctaactctgcgcccaacgcccgctgtttatgttctgcggtaacgatatccgccatcagccgatccacccgcgcctgataacgcgtcgggtccagtcgaaatagcacctcaccttttttaatcagcgtatttttcttatccgtcacttcgatcaccacgcctgtcacctgtgggacaacaggaatagaaataaccgctttttgcgctttgaaggtatacggatggttatagttcattaacagaattaaaccactgacaataaatatgccacccagggccgctgtgggaatggtccatttatttacaggaattttgaagatcttaaacattgcccatgcaaaagccacataggtcaaaataatcagtaaatccataagtattactcggcagaagaggatttgatgtcggcgagctgtttctccagcccggcaatacgctgttgtagttgcacaacggaggagtcatggttttgcattccccatccccgctccgggcggtaaagcgtggcccaaatccacaaaaatggccagataacatgcagcgtaaaaagactcacccaaccagcaacatgaatggcgtcggcatgaggatgattacgttttttagcaatcaggtagggaatatcatgtaaaataataatcccatagaatatcaccagaaatacaaaaataagcactcccagtgcaaaatagtccaggaacatatttccctcaaagaatataaaaaagaacaattaacgcatattatgaaatgccatgatgcagtgcaatttccttatttatataacgacatattgttttttatatactttctgaaatgtgctgtctggtttttcaacaggacgaggtttatcatattgaaatagtggaactattggccaaactaatgaataactccagtaaaacatccacagtacagattaagcgtattaaaccttcaattatctaccgtttattgctgattggcctcggatcaccaatggtgatttacggcctggttcgcccgctcaccatcgaaacgcgagattaaactcctgacaaaacacgccccagaaactcacttctgttggcgtagtctgggttattgcgcacgtaggtttaaaacgtaaattgtaacaacgtgcgctttgtttatgccggatgcggcgtgtacgccttatccggcctacggtcaggttcccgtaggcatgataagacgcgtaagcgtcgcatcaggcaatgaatacccaatgcgaccagcttcttatatcagaacagccccaacggtttatccgagtagctcaccagcaggcacttggtttgctggtaatgctccagcatcatcttgtgggtttcgcgaccgatacctgattgtttgtagccaccaaacgcagcatgtgccgggtaagcgtgatagcagttggtccacacgcgcccagcctgtatgccgcgccccatcttataggccagattaccgttgcggctccagacacctgcgcccaggccatattgcgtgtcgttcgccagctccagcgcctcatccatcgttttaaaggtggtcaccgccagcaccgggccaaaaatctcctcctggaacacgcgcatattgttctgaccaaacaaaatcgtcggttcgaggtagtagccgtctttcagttcaccttccagcagcttgcgccgcccgcctgtgagcacgtcagcgccctcttttttaccgatatcaatgtagttgaggatggtttccagttgcccgtgagaaacctgcgcgcccatttgcgtcacgctgtcgagcgggttaccgctacgaatgctttcgacacggcggatggcgcgttccataaagcgttcgtagatagattcctgcactaaagcacgactcggacaggtgcaaacttcgccctggttaaaggcaaacagtgcaaagccttccagcgctttatcgaaaaaggcatcttcttcatccatcacatcagcaaagaagatatttggcgatttgccgcccagctccagcgtcaccggaataatgttttgcgtggcgtattgcataatttgttggcccacttccgttgagccggtaaacgccactttggcgatgcgtttcgaggtcgccagatattcgccaatttccccacctgcgccgttgaccacgttcaccacgcccggcggcagtaaatcaccgacgatttccattagcagcagtacagaaagcggggtaagacgtgcgggtttcagcaccacacagttgcccgccgccagcgcgggagccattttccagctcgccatcagcagcgggaagttccacggaataatctgccccaccacgcctaacggttcgtggaaatgataggccacggtttcgctatcaacttcactgataccgccttcctgtgcccggatacacgaggcgaaatagcggaaatggtcaatcgccagcggtacatcagcagcactggtttcgcgaatgggtttgccgttatcccaggtttcagctgtcgctaacagctcgaggttttgttccattcgatcggcaatcttaaacagaatcgccgcacgatcctgcaccgaggtgtgcgcccatttatctttcactttgtgcgcagcatccagcgccagatcgatgtctcgtttgcccgaagacgccacttcgcacagcagctgcccggtcaccggcgtcagattctggtaatactcgccgtcggcaggggctacccattcgccgccaataaagttgtcatagcgggcttttaacttgagggggaaaccatactcgccgggcttaatctgtgctgaagggggattattggtcatgatcgtctccttgcggtgtgaggtataacaagggtagacgtgactggcgaaatcttcgccagtcggtaacagctttacgacagctatcacgaatttacgggcaagggttacagagatagttgaaaaagcggctgacaatttgccagccgttgtggaaatgatgattacatcgctgcgcgataaatcgccacaatttcttcgtgagttgcctggatcgggttagtaaaaccacaggcatctttcagggcattagttgccagaaccgcgaaatcttcttctttcacgttcaggtcgcgtaggcctgccgggatatccactttcttcgccagttcacggatggcgttaatgcaggcttcagcaccttccgcatcgtttttacctgtcacgttcacgcccattgcagcggcacagtcacgcagacgtgcggcggcgactttgctgttgaatacctgaacatgcggcagcaaaacggcgttacatacaccgtgtggcaggttgtagaaaccgcccagctggtgcgccatcgcatgaacataacccagagaagcattattgaacgccataccggcgaggaactgggcataagccattgcttcacgcgctttcgcattactgccatcttcaacggctaacggcaggttttcggcaatcatggtcacggctttcagtgcacaagcgtcagtgatcggcgtggcggcaatagaaacatacgcttcgatagcgtgcgttaaggcgtccataccagtggcggcggtcagtgacttcggcataccgatcatcagcgaggagtcattgacagaaagcagcggagtcacgtgcttatcaacaatcgccattttgatgtgacgcgcttcgtcggtgatgatgcagaaacgagtcatttctgatgctgtacccgcagtggtattgatggcgatcatcggcagctgcggttttgcagagcggtcaacgccttcataatcacggatatcaccaccattggctgccaccagcgcaataccttttgcacagtcatgcggagaaccaccgcctaaggaaatcacgctatcgcaattattttctttaagtaatttcaaacctgcggcgacgttttccgtggttgggttaggttgggtgccatcataaataacgctaaaaatattgcgttcttccagtgctttttgcacatcacccgccatacctaatttcgttaacatattgtcagtgacaattaaggtacgggtaaatccataatctgccatcatattcattgcatcagtcaatgaatcagcgccgatgacattcacagaaggaataaagaaagttgaagatgccataacacactcctgaaagtgtaaaaaagggcgggcagcttactgaggattttcattcgaaaatatgatcagtattattgattatcaaaattaatctaataaaaagcacattgtattcattaaacaatgtgctttttttaaaatcataagaaatttgtattaatttattttaaaaattaattaatcatttccttatttttccggaaataataatgcgtcgcgcaataaatgatcatttccacgacgacgcgtaaagccaatgcggtcaaaatattccagaatctgaattgccagctttcggcctacgcctaagcgatcgcggaaatccgccgcgcaggttgaaccacactcctgatcgagatcgcggatcatattggcaaattcgacaatccgatcgttacggtaataacgatctttgacgatcgcggtaattattccttgctgcgccgcctggcgcagcgtcaggcgcattgcctgctcgtcggttcccgtctcttttgccaggtcacgcacccaccacggctcgtcaccaaacagcggctctgctttttgccagatggcctgctgctcttcgctgaagcccgctttgtgatctggcagatgcagccaaccgtgatgactgaggatgtcgccgctttcgcgcatcttttcaatcagcaacagtaccagcgcttcatcttccattggcaacgccatacgtcgcagacgttcgcgcccaggaccaggttcatcgcgatgttgctcatgataagtcgctaatgtgtcaagaattttccgctgccagcgggcggcaaccggcgcattcaacaagctataaccagcctgaatataaccaggctgttgcagcaattcgcgcatcccttcgccgttgagctggcgcgcccaggcgaaatccgcaaggttaaccgcgccgcgttccagatgaacagataacgcatcggcatcgctctgcgcccgtgcaagagacgccagccattgcagatattccggcttacgtttaccgcgacgcggcgggttaagcatcacgacgcgcgctccggccagcgtgttgcgggcagagatatcgcgcaataccaggcggtcgttatctgccagccataacggggtgtcgaagaccagttcagcaaggttatcttccagcagtgaaacgcgtcccgtgacgtggctggcggcgtggtgaatatgcagcggctgccactgggtcagcggtgtatgggtttgaagctcgacaatcacccgtgtgaacggctctggcggcacatcggcaagcagccagtcgccacggttaatctgctctttttccgcatcacccgcgatgttaagcgcgatacgctgcccggcattggcggtttctgttggctggttttgcgcatgcagcgcacgtacacgcatcggtttatttacaccagtcagccagagtgaatcgcctaccttcacttccccgcttaacgccgtaccggtgacgaccagcccggcaccttttacggtaaatgcgcggtcaatcgcgaggcggaaactatgttggctggcgtgctcgcgttccggcaactgaagcagatgctcgcgcagggcatccattccccgaccttcggttgctgcggtgataaacagttttgcctcagcaaaaccgtattcccgcagaacctcctttacctggcgttcaacctcatcaacacgcgcttcgtccacgcgatcggctttggtcagcgccactgtcagcatcgggttaccggtcagctgcaaaatcgccagatgctcacgggtctgtgccatcacgccgtcatcgcacgccaccaccaacagcgcgtgatcgataccaccaacgcccgccagcatgttggaaagaaacttttcatgaccgggaacgtcgataaaaccaggcacgcgaccatccggctgcggccagtaggcatagccgagatcgatggtcatgccgcgctttttttcttccggcagacggtcagcatttacgccagtaatcgcctgcaataaggttgttttgccgtggtcaacgtgtccggcagtcgcaataatcatttcaacaacatctccaaaaaccgttgctcatcttcaaggcagcgtaaatccagccacaatcgtccgtcataaatacgaccaatcaccggcactggcaattcacgccagcgggcggctaatgactcaaggtggctaccgcgtccatcatggggtgtaaacgttaatgccgcgctcggcaggcgatcaaccggcagcgaaccactgccaatctgcgaaagacatggcataacctgtaccgcaaactccgcgccgtaatgtgcggcaaggggggcctgtaaacgttgtgcctggatttgaatgacctctgcgctgcgggtaagcaggcgcagggtcggtaatttttcactcagagcttcagggtgtaaataaagacgcaacgtggcttccagcgccgcgagggtcattttatccgcgcgtaatgcacgcttcagcgggtggctttgcaggcgggcgatcatctcttttttaccaacaataattcctgcctgcggcccgcctaacaacttgtcgccggagaaactcaccagactgacgcccgccgcaatcaactcctgcggcattggctctttcggcaaaccgtactggctaagatcgaccagcgagccactgcctaaatcagtcactacgggaacatccagctctttgccgagcgccaccagttccgcttcatctatcgctttggtgaacccctgaatgctgtagttactggtatgtactttcatcaacagtgcggtattttcattcaccgcctgacgataatcattcgcgtgcgtgcggttggtggtccctacttcgtgtagggtgcagcctgcctgacgcataacatcgggaatacgaaacgcgccgccaatctccaccagttcgccgcgagataccaccacctcttttccgctggcagtggccgccaacatcaataacaccgccgccgcattgttattgacgatacaggcatcttccgcccccgtaatacggcacagcagctgcgccagcgcccgatcgcgatgtccgcgtccggcgtcgtccagatcatactcgagggtcactggcgaacgcatagcctgcgcaacggcttccaccgcggcttccgcctgtaaagctcgcccaaggttggtatgcagcacggttcccgtcaggttgatcaccggacgcagcgcgctctgcgcttctttcgtcaaccgggcatcgacttcttgcgcccagttttcacaccacgcaggcagcgtctggctgccacgaatcacttctcgcgcttcgtcgagcatctgacgcaacaattccaccacgcgggtgtgaccataagtatcacgcaaagaaaggaaggagctatcgcgcaataagcgatcaatagccggaagttgactatagagggaacgcgtttcggttgtcataggaaacctggctgatcaaggccctctcacacggagaagggcgtttaacataaccacggattgtaacgtgagatgggtcaggaggacatatcgcgcatcaagcctttggcggttcggtgcgagcaaaactttcgcggctaaacaggttttcgaccagtttgactaagtgtgggcggtcgacacaccaacctggcgcaacgcggcggaaattgagatatccgacggcacaggcaatggcgatagtcgccagattgaccgtatcggttttgagtgtgccatcgaccagatatccttccagcacatccagactgcggttgattttctcccgctggcgtaacaattcatcttcagactgctgcgccgctggacgcgcctgttcacgcaccgataccagcccggcatccataatgccatccgccagtgcctcaattttgcgcacccgcaacgactccagcggatcgcgcggcaacatcgccggagcgacattcattaattcaatatattcagcgatgatcggcgaatcaaaccaacattcgccctcttcggtcaccagcaccggcacttttcctaacgggttaaattgcgccacgccgttgtccgcgttatagggcagttcattaataaattcgaaagttatgcccttttctaacaacagaatagaaagtttgcgtacaaacgggctggtgtagctaccgacgagtttcatgccgagtcctttgtgcgaggaaaaatatcagtatggcctggtgatgggaaaaagggcagaaaatgttgatggtttgttacttccaaataaatcacatatttatcatggtgatataaatattttcctaattgtttctatctgatggatatctcacttaaggctttcttataaatctgtagggttttgcctggaagcagacaaataacccgataaaacaaggatgagcagatgagcggaaaaccggcagcgcgtcagggcgacatgacgcagtatggcggtagcattgttcagggttcagccggggtgcgcattggtgcccccaccggcgtggcctgttcggtgtgccccggcggagtgacgtccggggagcgattcatgtcattagtgcgttctcaacaatgcacagtctggtcatcggacagatcaagacggataagaaatccaatgagatcacagctatccctgaacttcttaacatgctggatattaaaggaaaaatcatcaaaaccgatgcgatgggttgccagaaagatattgcagagaagatacaaaaacagggaggtgattatttattcgctgtaaaaggaaaccaggggcggctaaataaagccttcgaggaaaaatttccgctgaaagaattaaataatcccaagcatgacagttacgcaattagtgaaaagagtcacggcagagaagaaacccgtcttcatattgtttgcgatgtccctgatgagcttattgatttcacgtttgaatagaaagggcagctatggttagaaactacctgacgtcagtccttgcggggagcaggctttcgtaaatttgtcctgctacaacaggattaacttcacaaatatcatttctcaacgtctacacttactcctgtaaaccgctcaggagcagtaatgaatctacaacgatttgatgacagcaccctaatccgtatctttgcccttcatgagttacatcgactgaaagaacatggcttaacgcgcggggcgcttctcgattatcacagccgctataaactcgtctttctggcgcattctcagccggagtaccgcaaacttggcccgttcgtggctgatattcaccagtggcaaaatctggatgactattacaaccagtaccgccaacgcgtagttgttttgctttctcaccccgccaacccgcgcgatcacaccaatgttttgatgcacgttcagggttattttcgcccgcatattgattccacagaacgccagcagctggctgcgcttatcgacagttatcgccgtggcgagcaaccacttcttgcgccgctgatgcgtatcaaacactatatggcgctttatcctgacgcctggctttcagggcagcgttatttcgaactttggccgcgtgtgattaacttgcgccattcaggagttttatgactacccatctggtctggtttcgccaggatttacgtctgcacgataatctcgcactggctgccgcctgccgcaattcgtctgcacgcgtgctggcgttgtatatcgctacaccacgccagtgggcgacgcataacatgtcgccgcgtcaggctgaacttatcaatgctcaactgaatgggctacaaatagcgcttgcggaaaaaggtattcctttattgttccgtgaagtggatgactttgtcgccagtgtcgaaatagttaaacaggtgtgcgcggaaaacagcgttacccacctgttttataactatcagtatgaagtgaatgagcgggcgcgggatgtggaagttgaaagagcgctgcgtaacgtggtgtgtgaaggatttgatgacagcgtgatcctgccgcctggcgcggtgatgaccggtaatcacgagatgtacaaagtctttacgccttttaagaatgcctggctgaaacggctgcgggaagggatgccggagtgcgtcgctgcgccaaaagttcgtagtagcggatcgatagagccctcgccatccattacgctgaattatcctcgtcagtctttcgatactgcgcattttccggtggaagaaaaagcggcgattgcgcaattacgccagttttgccagaacggtgccggagaatatgagcaacaacgagattttccggcagtggaaggcaccagccgtttgtcggccagcctggcaacgggcgggttatcgcctcgccagtgcttgcatcgcttgttggctgaacagccgcaggcgctggacggtggggccggtagtgtctggcttaatgagctgatctggcgcgagttttaccgtcacctgataacgtatcacccctcgttgtgtaaacatcgtccatttattgcctggacggatcgtgtacagtggcagagcaatcccgcacatttacaggcctggcaggaaggcaaaacgggatacccgattgttgatgccgctatgcgtcagcttaacagcactggctggatgcataacaggctacggatgattacagccagttttctggtgaaagatttattgatcgactggcgcgaaggcgagcgatatttcatgtcgcagctgattgatggtgatttggcagccaataacggtggctggcagtgggccgcttcaaccggaaccgatgcagcgccgtattttcgtattttcaacccgacaacccagggcgagaaatttgatcatgagggcgagtttatccgccagtggctaccggaactgcgcgatgtgccagggaaagtggtgcatgagccgtggaagtgggcgcagaaagcaggtgtgacgctggattatccgcaaccgatagtcgagcacaaagaagcgagagtacaaacgttggcagcgtatgaggcggcgcggaaggggaaataacagacgcgtcaggcaatcgagcccagatgccggatgcggcgtgaacgccttatccagcctacaaatttgtgcaaattcaataaattgcaggaaatacgtaggcctgataagacgcgtcaagcgtcgcatcaggcatcggtgctggcctattaagactccagcgccagcgcgcggtttctgaatttcagcgcctgatacagccaaatcatcagtaccagtcctacacacgccagtgcgccccaggtaatttgatcaaatacttcaatatatgcattgatggagtagttgatcgccccggaagcatcaaacgaagcctgcgatgtctgatcggcaatcacgcccgccagatagttcgcgatcgcgccagaaagcagcatgtagatgccggttaatacgccggtcacaccggggatttcaatgcgcgtaatttgcgacatggcaaccgggtcgataaacagttccgcaaagcccatcaccgccaggcctaataccatcagtggcagagaagagtgaccatacattgcggaccagcgggcgcttaaggtcagaatgcagaatccggcgctcatcaggccaaggccaagagcaaatttcccccagatgcgcacggtacgattacccgcgacactctcttttaccacccacgccaggaacacaccgcacagcataactgcgaaggcattaatcgactggaacatcgcggtcggaacggtataaccaaacatatcgcggttaacgaagcggtcgatataaaggctaatcgagctaccgccctgttgtgcgaaggcccagaacaacatactgaagaaggtgagcgtcacaatcagccccagctccttccgctgtttctggttttctgctttgcgataaatttttgccagtacacccaggccaataatagtcgcgacaattaaggcgtataccgaccactctttccagaacagtatggtaatcagtgcaggcgttgccaccagcagaaccagcagccatccccagttcggcaggagaaagtttgtcgcacgcagtacttttttgttaacgccgcgggtatgagtgaaatgacgattgccacataagaaaatgaccagacccgcgatcatgccaaccgccgccaggccaaagcccatcgcccagctgtactcttcctgggcgtaaccacaggcgataggtgcgataatagaccccacgttacccgccgcatacatcagcgagaaaccgccatcacgacgcggatcggttggctcatacagctcgccgagcagacagcttacgttagatttaaacaggccatagccgcagacgataatcgccagggacagatagaggaatgacggatggatctcactggcacccagcaccatatgaccgatcgccatcaacaacgcccccagcatcaccgccatgcgattgccgagaactttatccgccaaaaagccaccgaggattggcgtgacatacaccagcgaacagtaggcgctaaataactcgtaggcgtgagtatcgttgtattttagttgattggtgagatagagaatcagcagggcacgcatgccgtaaaagctaaaatattcccagatttgcagcgcaacgacatagtaaatagcgcgcggctgtgatgcgtgtttattcataataattccacaattgacggcaacgtcacgtaatagttgcgcggcgtgcttgtgtttccttaaagttaaaactttgatacagatctgattatttatgcaatatgctgtctgattgcataaatatacattagctgaagcgtgatgatataaacaatttgcgtcttttggcgtcgggtttgtttcttaatatgtcaaaagattggctatcgacgaactggcgaggtaacgctatgttaacggtgtagctatcagaatacggaaggcgcgaagatgaaaaacaccgaactggaacaactgattaacgaaaaactgaacagcgcggcgattagtgattacgcgccgaatggtttgcaggtggaaggcaaagagacggtgcaaaaaattgttaccggtgtcaccgccagccaggctttgctcgatgaggcagtgcgtctgggcgcggatgcggtcattgtgcatcatggctacttctggaaaggagagtctccggtcattcgcggaatgaagcgtaaccgtttaaaaacgttgctggcgaatgatatcaacctgtatggctggcatttgccgcttgacgcacatcctgagctgggcaataacgcacagctggcggcgttactggggatcacggtcatgggcgaaattgagccgttggtgccgtggggcgaactgaccatgcctgtgccgggactggagctggcttcctggattgaagcgcgtctgggacgtaagccgttatggtgtggcgataccggacctgaggtggtccagcgcgtcgcctggtgcacgggcggcgggcaaagttttatcgatagcgccgcgcgttttggcgtggatgcttttattactggcgaagtttctgaacagaccattcattcagcccgcgagcagggattgcatttttatgctgcaggtcaccatgccactgaacgtggtggtattcgcgcattgagcgagtggctgaatgaaaataccgatcttgatgtgacctttattgatattcctaatcctgcataacgaataatcagagggatcgaaagtgcaacgagcgcgttgttatctgataggtgaaacggcggtagtgctggaactggaaccgccggtgacgctggctagccagaaacggatctggcgactggcgcagcgtctggtggatatgccgaatgtggttgaagccattcccggcatgaacaatatcacggtgattttgcgtaatcctgagtcgctggcgctggatgccatagagcgtttgcaacgctggtgggaggagagcgaggcgctggagccggagtctcgctttattgaaattccggtggtttacggtggtgcaggcggaccggatttggcggtggtcgcggcgcattgcgggttgagcgaaaaacaggttgttgaattgcactcctccgtggaatacgtggtctggtttttaggttttcaaccgggcttcccgtatctcgggagtttgccggaacaactacacacgccacggcgcgctgaaccgcgcttactcgttccggcaggttctgtcgggatcggcgggccgcagactggtgtttatccgctggcaacgccgggtggctggcagttgattggtcatacctcactcagcctgtttgatccggcgcgtgacgaacccatcttattacgtccgggagacagcgtgcgctttgtaccgcagaaggagggagtatgctgaagattattcgtgcgggcatgtataccactgtgcaggatggcggtcgtcacggttttcgccagtcgggtatcagccactgcggcgcactggatatgcccgcgttacgcattgctaacctactggtgggtaatgacgccaatgcccccgcgctggagatcacgctcggtcagttaactgttgagttcgaaactgatgggtggtttgctctgacgggtgccggttgcgaagcgcggctggatgataatgccgtctggaccggctggcgattgccgatgaaagcaggccagcgtttaacgcttaaacgcccgcagcacgggatgcgcagttatctggcggtcgcgggtggtattgatgttccgccggtaatgggctcatgcagcaccgatctcaaagtggggattggcgggctggaaggccgtttactgaaggatggtgaccgactcccgattggcaaatcgaagcgtgattctatggaagcgcagggcgttaaacagctgctgtggggcaaccgcattcgcgccttgccggggccggaatatcatgagttcgatcgcgcctcgcaggatgcattctggcgttcgccctggcagcttagctcgcaaagtaaccgcatgggctatcgcttacaggggcaaattttaaaacgcaccaccgatcgcgaactgttatctcacggtttgttaccgggcgtggtgcaggtgccacataacgggcagccgattgtgttgatgaacgacgcacagaccaccggtggttacccgcgtattgcctgtatcattgaggctgatatgtaccatctggcgcaaattccgctcggtcagccgattcattttgtccagtgttcactggaagaggcactgaaagcgcggcaagatcagcaacgttattttgaacaattagcgtggcggctgcacaatgaaaattgacctgaacgccgatctgggcgaaggctgcgccagcgacgcagagctattaacgctggtttcctctgccaatattgcttgtggatttcatgcaggcgatgcccaaaccatgcaggcttgcgtgcgtgaagcaataaaaaatggtgtcgcgattggcgctcacccgagttttcccgacagggaaaattttggtcgcagcgccatgcagctgccgccagaaaccgtttacgcccagacgctgtatcaaattggcgcgctggcaacgattgcccgtgcgcaaggcggcgtaatgcgtcatgtcaaaccgcacggcatgttgtacaaccaggcggcgaaagaagcacaactggcagacgccatcgccagagcggtatacgcttgcgatccggcattgattctcgttgggctggcaggaagcgagctgattcgtgcaggcaagcaatatggcctgacaacgcgcgaggaagtgtttgccgatcgcggttatcaggctgacggctcgctggtgccgcgaagtcagccaggcgcgttgattgaaaacgaagaacaggcgctggcgcaaacgctagagatggtgcaacacggcagagtcaaaagtatcaccggcgaatgggcaacggtcacggcgcaaacagtctgcctgcatggcgacggcgagcacgcactggcgttcgcccgccgactacgctctacatttgccgaaaaggagattgttgtcgcagcataaccccgattaataaagaatgaaaaaaggatatcaccatgcctgaaggcccggagatccgccgtgcagcggataacctggaggcggcgatcaaaggcaaaccactaactgatgtctggtttgccttcccgcagttaaaaacttatcaatcacaacttatcggtcaacacgttacccatgtggaaacgcgtggtaaggcgttgttaactcatttttccaacgacttaacgctctacagccataatcagctttacggcgtctggcgcgtggttgataccggcgaagagccgcagaccacgcgagtattgcgggtaaaactgcaaacggctgacaaaaccattctgctttatagcgcctcggatattgagatgttgaggccggaacaactgaccacgcatccgtttttacaacgcgttggtcccgatgtgctggatccgaatctgacgccggaggtggtaaaggaacggttattgtcaccgcgctttcgtaaccgtcagtttgcaggattactgctcgatcaggcgtttctggctgggcttggcaattatttgcgggtggagatcctctggcaggttgggttgactggaaatcataaagcgaaagatctcaatgcggcgcaactggatgcactcgcacacgcgttactggagattcctcgattttcctacgctacgcgggggcaggtggatgagaataagcatcatggggcgctgtttcgctttaaggtttttcatcgagatggcgaaccgtgcgaacgttgtggcagcatcattgagaaaaccacgctgtcatctcgcccgttttactggtgccctggctgccagcactaggccgaccgcttcggcgcataggttgaaataaaccgcgcaatggcaggccctgtcagcaaaatactgaacaggcgtagggtttgcatcgccataatgagcgccatatcggcattgctccctgcggcgatgaccgccacggtatcaagcccgccggggctggtggcgaggtaggcagtcataaaatcaatgtgcataaaccgggtcagcccccacgccatacccgcacaaatagccagcagagcaaaaatcgacagcaggatttgcggtagcgggcgtagtgcccgcagtaagatttgtttatcgaaaccaagaccaatccgccagccaattgccatatacgccatcgccagcagccattccggtagttcgatggtgatgagctgaccagactggagcactgcgcccgccagcatcgggatgagcatcgtgccggaaggaagacgcagcaggcatcccactgtaccggcaacgaccgcgagcaaaatagtaagcaggagattaatgctcactggcgggaaccagacgatatgctggttaaccgcttcagcgttatcgcccagcatcatgcgggtgaccagaacagcggcccccgcgacgaacagcactcgcagatattgcataaacgccaccaggcgaatatctgcgccgtaatcttgcgccatagcgaccattgccgccgcgccgccaggagaggagccccaggcaccggtatttccaggcaatgagctatagcgcaccaataaccaacccacaatggcgctggaaagcagcgttaccagtaaaattgcaagcacgatcggccagttgacggccagggtggtgagaatcgaaccagtgaggttttgcgcaatcatgcagccaagaatggcctgggcggcgaaaaaagcagagcggggaagttgcagagtaattccgcgcatactaaagatgatcccggcgatcatcggcccaagtaatagcgccgccgggagatgtaccgcgaggaaaccaatagaaaggagaagtgatagcacacataacattccccactgcaaaactggcatccttcgctccctcattattttctctttggtgtatcgatacagcataaagaaagctgggccaggaaaaaataacagcaatcaaggaaaaggggaaaatcagcaattttctgaaagagatgccctttccggcggcaaagggcatcatggtaaatcagttatagttaatcttaaaaagcaccactgtatcgaaggggccagcctcgatgggggtgcctggaatggacgaaagttcagccgtataggttttttcgtagaccaacatgtcactggtgaaatcggcgtattcagcatatttattgaaggtataaggcgaggcgttttcatccagtaaacgtagcttcagaccattaccaatcaacaatgctttatcttcttcaaccaacgtttcttcggtataaaaggaggaactgactttaaatccgtcggtgcattgatcgttttggctcttggtcgttttaatactgaacgttttcgacattgtgtggcgacgtatatccagcaaattaaatttaccaaaatcaatcacctgtgtttccggtgaaatggaaaaattgacgctgcaatccagcacgcgaatgttttccagaccagtaatatgatatttcaggttttgggcagtagggtcttcgttaacgctaccggcaccgtcaaattgcacgacgatatagtcgctaagcgtactttgataatcatgcggcggcatttctcgtattttgacgtataaccgcatgcgagcgagaaaggtacgcgacatatgaatattagcgggatcgcccgagcaaattttgttctgccatcccatcgcgatgatctgctcaggggtataaatatcaatgttcttactgtcgatacactggttagtgtcgatgcgactttttcccagactggcatcgtaatcgacaccgttgtatgtcacgccgagttgataataacgatcctgcacccccggataggggtttacccaggcgtagacatgctcgctttcaaagttgccgttggtattgttgtcacaatagacgggaattttaatatcgtcagattcccagatcttatcaccgggtttggcattgcctggtacagcaaacggttgaatcgcttctgatttttctactgcgccaccagatgtaccaaaatagcagttcagcgccattgcagacttcaacggcagaaataacaggcagatgacgagcaacaatcccttgccagcactcatttcgcctccactgcttgtaaacggcattgtccgctgcagttgagcgtcgtcatgcgtaatgcgccgtaatcatccatataaccgagataaaactggctgccgctataacttccggtgtttgtgttgaccgtactaaaaggtgcaaccatcacggttttgaagcctgggagaacgcctttttcatttctccccagataggcaatggtcagataatacgcggtaggatttttcagtgtcagttggttgccctgctggctgacctgtaactgcagttcgaccttttctcctgctttcttgcgtaatgcagccggtcgccagaacaatttaatacgactttgaatagcgacctgaagtatcgcatggtcgctgcttttatccggagcgggaggaatttcgcgcatattgtagaaaaatagcgtttcgcgatcgccaggtaattgtgtggttgaggcttgtttcacaacccgcacctgcgatgtcgctttcggttccagacgttgaatagggggcaaagcgaccagaagagcatcgcttttctcccctttttcattttctatccaggaataagcaagataaggcagtttgtcactttggttttcgatacgcaggctggtggctttgtcattggcgttaaacacaatgcgtgtgcgatcgggttgcaccgcagcattgcagcccaagctgatggttaacaacattaagggtaatcctttaataaatgtcattctcttttccttaattaatgacaaggtaaaatcaggcgtttggtcgtgtcttccagacgttctggcagatgaataatgcagctttgctcaccccagaccacggtaaacagttgattttcagcgacaccgcttaaccaggcatgtccttcctcgccaaccatacccacgctaatgccgctatcatcctggcggatatccgcaccgaggggagggtactgaccgctggcgttgcgtatgatgacgttaacgtctttaccggaacgggaagccagtgatttgtaacctatcgcgccttcaatccatgtttccttgatgacgttttctgcaactgttacgccgtcgggtaagtcattcatgttcaccgccacggtggaaggctgataactggaaatcaacggcaccaccgcaatgccaaaatggttggtgtagtcgagattgccctgaaccggaatatctgccacgccatcggtgctgaccatcaggcgtggttcattggtagagctgcggcgatgaaacgctgcaccatattgggttgcggtgaaagaaccgctccagctgctgctgacggaactgtaatcattggcggcataggtaccagaaatatcccactcacccgctgaactcagatgctgatagttaccgctcacctgggctccattgtccggacgatcggattgcagtccggcagacatgccccagctattacgttcatccagcgtatcgttccacgacatgcggtgtatggtgctgtggctactgttttgcatgtcatagccaacccgaccaccgttaccgaaggggagcgaaattgacagataaatctggttgtcgcgatctttatcttcgtagtgggtcgtattgaatgacgtcgaaatcgagatatctctccagtcaccaatatcaacattaaaacctgctgtgatgttggcggtcgtggaggcgtctgcattccacctggtttgatgtagcaggttggcgtaaagattgaggtttagtggggtaatcggttggcccacggataagctgatcgtctgtttttcgtcctgcgcatcgctgtcgttgtatttgtgatccagatagttggcgtagctgtgaaaatgacgatctgagaagcgataagcggcgagcgaaatcgtgctgttggtggcatccacttgtttgctgtaattaaaacggtagcttaagccccgctcgtcctgctgagtatcaaaatggctactggcccacgtgatatcaaacgacagcgcaccaagccacagcatattttgcccaatacccattgcggcagaatggtagtcatcaccagaaagcagcaggccgccgtacagcgaggtgtttgacagcatcccccaggaaacttcattgctaaaaaaggtttcattttcagtttgatgtgacatggagggccgtggctgacccgcggccagtttatagcgaacctgtccctgacgagtcaggaagggcgtcgatgctgccgaaacctggaaattgttcacccgaccatcttcttccgtcactttgacatcaagcgtgccctgaacagactgattgaggtcatcaataataaacggtcccggagggacttttttctggtaaatgacgcgacctgattgactgatcgtcaccgtggcattggtctgtgcaataccgctaatttgtggggcgtatccgcgtagctcccatggcaacattcgatcgtcactcgccagtgccgcgccagtataagaaaaaccatcgaaaatattggaactgaaatcggtttcgccgagggttaatttagagcctaattgcggtaatggacgaaaaagataggtgcgcgatattccgcctgactgttcatggctatcttcgctatcggtgttattaagctggtaatcactgcgtaagcgccatgacccggcgttaattccggtggtaccgtaggcgttcaggttagtgctgctgctgccgtcctgtgggcggtagttgctggcaaacaggttataatccatcaggaccccggcaacaccttctttccatgtagaggggggagcccagttttctgagtgccacgccagccaggcttgcggaatactaatattcagttgctgattggcttgatcgaaattgaagagcatttcaggtcgggaactgaaatcaatacaccgatctatctgtggcaaggactgacggatatctggttttaaaccaaatttatcgaccagtgaatcattgatgcatggaatggttttgtcaccctttttttgccagttgattttttgcccattactgatttggttgttattcaccgcaacgctaacaaaatattcaccgggagcaatgactcctttttcctttaataatgaaatatcaatgcggtcgcgcattgatttatcgagaacattcagattaaattcgaccgccaatgcgcaaggcatcgccatgaccaggcaggatacaaaagagagtcgataaatattcacggtgtccatacctgataaatatttgaagaaaggcggcgatagcgccgccaaagtaatacttatttataatccagcacgtaggtcgcattcgctgtaactgcgcctggcgttacaggtgtagcctgatcaatttgttccatccaggcaaagaaattcagcgtttgttcgctggaggtcggagccaggtcgatatctggagtagcggtgcctaaaacgatattgctttgatctttattcattaaacgtacgccgacgccggtggcttcacccgtgctggtgttgttgagaatcggatctgcgccggtggttttcgctgagctatcaaaggtgactgcaactttagaaatcttgccaccggaaccgttgctggagttttccagatcacagttgactaagcgcaggtcgacagcaacggcatcgctgtgatgtgactgattaatgtggctggtggtcacctgaccgagttcaacctctttatcaatatcatcctgatgtatttcacacggtgcttcaataacttcacctttaaagtgaatttcaccggatccttcatcagctgcataaacaggtgcagtgaatagcagagatatggccagagcggtcaatgttttttgtcctttaaacataactgagtcctttaaataatgagatagagtgttgcgtggcaagaatatataaaatgacaattgaatgtatttggttttatttaataatattaaaaagcttgtgatataaagaatggaataattgagtgcataaatttattgtttaatgagatgaaggatggggtgggatggatatgcataattttcattgggttaacaatgttaccggcagggaagtataaaaataaacttatcattctgctcagtatgtgacttgtctcattttttcaccttattaatgggtatttgcatctggtttaatttttacaattttttatgttcagccatataaaaaagaacccgctctattaaaggcgggtccggaaagtaaacggcttagcaatcaatcattaacgcttgatatcgcttttaaagtcgcgtttttcatatcctgtatacagctgacgcggacgggcaatcttcataccgtcactgtgcatctcgctccagtgggcgatccagccaacggtacgtgccattgcgaaaatgacggtgaacatggaagacggaatacccatcgctttcaggatgataccagagtagaaatcgacgttcgggtacagtttcttctcgataaagtacgggtcgttcagcgcgatgttttccagctccatagccacttccagcaggtcatccttcgtgcccagctctttcagcacttcatggcaggtttcacgcattacggtggcgcgcgggtcgtaatttttgtacacgcggtgaccgaagcccatcaggcggaaagaatcatttttatctttcgcacgacgaacaaattccggaatgtgtttaacggagctgatttcttccagcattttcagcgctgcttcgttagcaccaccgtgcgcaggtccccacagtgaagcaatacctgctgcgatacaggcaaacgggttcgcacccgaagagccagcggtacgcacggtggaggtggaggcgttctgttcatggtcagcgtgcaggatcaaaatacggtccatagcacgttccagaatcggattaacttcatacggttcgcacggcgtagagaacatcatattcaggaagttaccggcgtaggagagatcgttgcgcgggtaaacaaatggctgaccaatggaatacttgtaacacatcgctgccatggtcggcattttcgacagcaggcggaacgcggcaatttcacgatgacgaggattgttaacatccagcgagtcgtgatagaacgccgccagcgcgccggtaataccacacatgactgccattggatgtgagtcgcgacggaaagcgtggaacagacgggtaatctgctcgtggatcatggtatgacgggtcaccgtagttttaaattcgtcatactgttcctgagtcggtttttcaccattcagcaggatgtaacaaacttccaggtagttagaatcggtcgccagctgatcgatcgggaaaccgcggtgcagcaaaataccttcatcaccatcaataaaagtaattttagattcgcaggatgcggttgaagtgaagccagggtcaaaggtgaacacaccttttgaaccgagagtacggatatcaataacatcttgacccagcgtgcctttcagcacatccagttcaacagctgtgtccccgttgagggtgagttttgcttttgtatcagccatttaaggtctccttagcgccttattgcgtaagactgccggaacttaaatttgccttcgcacatcaacctggctttacccgtttgttatttggctcgccgctctgtgaaagaggagaaaacctgggtacagagctctgggcgcttgcaggtaaaggatccattgatgacgaataaatggcgaatcaagtacttagcaatccgaattattaaacttgtctaccactaataactgtcccgaatgaattggtcaatacttccacactgttacataagttaatcttaggtgaaataccgacttcataacttttacgcattatatgcttttcctggtgatgtttgtaacaactttgttgaatgattgtcaaattagatgattaaaaattaaataaatgttgttatcgtgacctggatcactgttcaggataaaacccgacaaactatatgtaggttaattgtaatgattttgtgaacggcctatactgccgccaggtctccggaacaccctgcaatcccgagccacccagcgttgtaacgtgtcgttttcgcatctggaagcagtgttttgcatgacgcgcagttatagaaaggacgctgtctgacccgcaagcagaccggaggaaggaaatcccgacgtctccaggtaacagaaagttaacctctgtgcccgtagtccccagggaataataagaacagcatgtgggcgttattcatgataagaaatgtgaaaaaacaaagacctgttaatctggacctacagaccatccggttccccatcacggcgatagcgtccattctccatcgcgtttccggtgtgatcacctttgttgcagtgggcatcctgctgtggcttctgggtaccagcctctcttcccctgaaggtttcgagcaagcttccgcgattatgggcagcttcttcgtcaaatttatcatgtggggcatccttaccgctctggcgtatcacgtcgtcgtaggtattcgccacatgatgatggattttggctatctggaagaaacattcgaagcgggtaaacgctccgccaaaatctcctttgttattactgtcgtgctttcacttctcgcaggagtcctcgtatggtaagcaacgcctccgcattaggacgcaatggcgtacatgatttcatcctcgttcgcgctaccgctatcgtcctgacgctctacatcatttatatggtcggttttttcgctaccagtggcgagctgacatatgaagtctggatcggtttcttcgcctctgcgttcaccaaagtgttcaccctgctggcgctgttttctatcttgatccatgcctggatcggcatgtggcaggtgttgaccgactacgttaaaccgctggccttgcgcctgatgctgcaactggtgattgtcgttgctctggtggtttacgtgatttatggattcgttgtggtgtggggtgtgtgatgaaattgccagtcagagaatttgatgcagttgtgattggtgccggtggcgcaggtatgcgcgcggcgctgcaaatttcccagagcggtcaaacctgtgcgctgctctctaaagtcttcccgacccgttcccataccgtttctgcgcaaggcggcattaccgttgcgctgggtaatacccatgaagataactgggaatggcatatgtacgacaccgtaaaaggttcggactatatcggtgaccaggacgcgattgaatatatgtgtaaaaccgggccggaagcgattctggaactcgaacacatgggcctgccgttctcgcgtcttgatgatggtcgtatctatcaacgtccgtttggcggtcagtcgaaaaacttcggcggcgagcaggcggcacgcactgcggcagcagctgaccgtaccggtcacgcactgttgcataccctttatcagcagaacctgaaaaaccacaccactattttctccgagtggtatgcgctggatctggtgaaaaaccaggatggcgcggtggtgggttgtactgcactgtgcatcgaaactggtgaagtggtttatttcaaagcccgcgctaccgtgctggcgactggcggggcagggcgtatttatcagtccaccactaacgcccacattaacactggcgacggcgtcggcatggctatccgcgcaggcgtaccggtgcaggatatggaaatgtggcagttccacccgaccggtattgccggtgcgggcgtactggtcaccgaaggttgccgtggtgaaggcggttatctgctgaacaaacatggcgaacgctttatggagcgttatgcgccgaacgccaaagacctggcgggccgtgacgtggtggcgcgttccatcatgattgaaatccgtgaaggtcgcggctgtgatggtccgtgggggccacatgcgaaactgaaactcgaccacctgggtaaagaagttctcgaatcccgtctgccgggtattctggaactctcccgtaccttcgctcacgttgatccggtgaaagagccgattccggttatcccaacctgtcactacatgatgggtggtattccgaccaaagtgaccggtcaggcgctgacggtgaacgagaaaggcgaagatgtggttgttccggggctgtttgccgttggtgaaatcgcttgtgtatcggtacacggcgctaaccgtctgggcggcaactcgctgctggacctggtggtctttggtcgcgcagcgggtctgcatctgcaagagtctatcgccgagcagggcgcattgcgcgatgccagcgagtctgatgttgaagcatctctggatcgtctgaaccgctggaacaataatcgtaacggtgaagatccggtggcgattcgtaaagcgctgcaagaatgtatgcagcataacttctcggtcttccgtgaaggtgatgcgatggcgaaagggcttgagcagttgaaagttatccgcgagcgtctgaaaaatgcccgtctggatgacacttccagcgagttcaacacccagcgcgttgagtgcctggaactggataacctgatggaaacggcgtatgcaacggctgtttctgccaacttccgtaccgaaagccgtggcgcgcatagccgcttcgacttcccggatcgtgatgatgaaaactggctgtgccactccctgtatctgccagagtcggaatccatgacgcgccgaagcgtcaacatggaaccgaaactgcgcccggcattcccgccgaagattcgtacttactaatgcggagacaggaaaatgagactcgagttttcaatttatcgctataacccggatgttgatgatgctccgcgtatgcaggattacaccctggaagcggaagaaggtcgcgacatgatgttgctggatgcgcttatccagctgaaagagaaagatcccagcctgtcgttccgccgctcctgccgtgaaggtgtgtgcggttccgacggtctgaacatgaacggcaagaatggtctggcctgtattaccccgatttcggcactcaaccagccgggcaagaagattgtgattcgcccgctgccaggtttaccggtgatccgcgatttggtggtagacatgggacaattctatgcgcaatatgagaaaattaagccttacctgttgaataatggacaaaatccgccagctcgcgagcatttacagatgccagagcagcgcgaaaaactcgacgggctgtatgaatgtattctctgcgcatgttgttcaacctcttgtccgtctttctggtggaatcccgataagtttatcggcccggcaggcttgttagcggcatatcgtttcctgatcgatagccgtgataccgagactgacagccgcctcgacggtttgagcgatgcattcagtgtattccgctgtcacagcatcatgaactgcgtcagtgtatgtccgaaggggctgaacccgacgcgcgccatcggccatatcaagtcgatgttgttgcaacgtaatgcgtaattaaatgttgatgccggggaaatcccccggctattcaggaaatctttaaaaactgcccctgacactaagacagtttttaaaggttccttcgcgagccactacgtagacaagagctcgcaagtgaaccccggcacgcacatcactgtgcgtggtagtatccacggcgaagtaagcataaaaaagatgcttaagggatcacgatgcagaacagcgctttgaaagcctggttggactcttcttacctctctggcgcaaaccagagctggatagaacagctctatgaagacttcttaaccgatcctgactcggttgacgctaactggcgttcgacgttccagcagttacctggtacgggagtcaaaccggatcaattccactctcaaacgcgtgaatatttccgccgcctggcgaaagacgcttcacgttactcttcaacgatctccgaccctgacaccaatgtgaagcaggtaaaagtcctgcagctcattaacgcataccgcttccgtggtcaccagcatgcgaatctcgatccgctgggactgtggcagcaagataaagtggccgatctggatccgtctttccacgatctgaccgaagcagacttccaggagaccttcaacgtcggttcatttgccagcggcaaagaaaccatgaaactcggcgagctgctggaagccctcaagcaaacctactgcggcccgattggtgccgagtatatgcacatcaccagcaccgaagaaaaacgctggatccaacagcgtatcgagtctggtcgcgcgactttcaatagcgaagagaaaaaacgcttcttaagcgaactgaccgccgctgaaggccttgaacgttacctcggcgcaaaattccctggcgcaaaacgcttctcgctggaaggcggtgacgcgttaatcccgatgcttaaagagatgatccgccacgctggcaacagcggcacccgcgaagtggttctcgggatggcgcaccgtggtcgtctgaacgtgctggtgaacgtgctgggtaaaaaaccgcaagacttgttcgacgagttcgccggtaaacataaagaacacctcggcacgggtgacgtgaaataccacatgggcttctcgtctgacttccagaccgatggcggcctggtgcacctggcgctggcgtttaacccgtctcaccttgagattgtaagcccggtagttatcggttctgttcgtgcccgtctggacagacttgatgagccgagcagcaacaaagtgctgccaatcaccatccacggtgacgccgcagtgaccgggcagggtgtggttcaggaaactctgaacatgtcgaaagcgcgtggttatgaagttggcggtacggtacgtatcgttatcaacaaccaggttggtttcaccacctctaatccgctggatgctcgttctacaccgtactgtactgatatcggtaagatggttcaggcaccgattttccacgttaacgcggatgatccggaagccgttgcctttgtgacccgtctggcgctcgatttccgtaacacctttaaacgtgatgtcttcatcgacctggtgtgctaccgccgtcacggccacaacgaagccgacgagccgagcgcaacccagccgctgatgtatcagaaaatcaaaaaacatccgacgccgcgcaaaatctatgctgacaagctggagcaggaaaaagtggcgacgctggaagatgccaccgagatggttaacctgtaccgcgatgcgctggatgctggcgattgcgtagtggcagagtggcgtccgatgaacatgcactctttcacctggtcgccgtatctcaaccacgaatgggacgaagagtacccgaacaaagttgagatgaagcgcctgcaggaactggctaaacgcatcagcacggtgccggaagcggttgaaatgcagtctcgcgttgccaaaatttatggcgatcgccaggcgatggctgccggtgagaaactgttcgactggggcggcgcggaaaacctcgcttacgccacgctggttgacgaaggcattccggttcgcctgtcgggtgaagactccggtcgcggtaccttcttccaccgccacgcggtgatccacaaccagtctaacggttccacttacacgccgctgcaacacatccataacggccagggcgcgttccgtgtctgggactccgtactgtctgaagaagcagtgctggcgtttgaatacggttatgccaccgcagaaccacgcactctgactatctgggaagcgcagttcggtgacttcgccaacggtgcgcaggtggttatcgaccagttcatctcctctggcgaacagaaatggggccggatgtgtggtctggtgatgttgctgccgcacggttatgaagggcaggggccggagcactcctccgcgcgtctggaacgttatctgcaactttgtgctgagcaaaacatgcaggtgtgcgtaccgtctaccccggcacaggtttaccacatgctgcgtcgtcaggcgctgcgcgggatgcgtcgtccgctggtcgtgatgtcgccgaaatccctgctgcgtcatccgctggcggtttccagcctcgaagaactggcgaacggcaccttcctgccagccatcggtgaaatcgacgagcttgatccgaagggtgtgaagcgcgtagtgatgtgttctggtaaggtttattacgacctgctggaacaacgtcgtaagaacaatcaacacgatgtcgccattgtgcgtatcgagcaactctacccgttcccgcataaagcgatgcaggaagtgttgcagcagtttgctcacgtcaaggattttgtctggtgccaggaagagccgctcaaccagggcgcatggtactgcagccagcatcatttccgtgaagtgattccgtttggggcttctctgcgttatgcaggccgcccggcctccgcctctccggcggtagggtatatgtccgttcaccagaaacagcaacaagatctggttaatgacgcgctgaacgtcgaataaataaaggatacacaatgagtagcgtagatattctggtccctgacctgcctgaatccgtagccgatgccaccgtcgcaacctggcataaaaaacccggcgacgcagtcgtacgtgatgaagtgctggtagaaatcgaaactgacaaagtggtactggaagtaccggcatcagcagacggcattctggatgcggttctggaagatgaaggtacaacggtaacgtctcgtcagatccttggtcgcctgcgtgaaggcaacagcgccggtaaagaaaccagcgccaaatctgaagagaaagcgtccactccggcgcaacgccagcaggcgtctctggaagagcaaaacaacgatgcgttaagcccggcgatccgtcgcctgctggctgaacacaatctcgacgccagcgccattaaaggcaccggtgtgggtggtcgtctgactcgtgaagatgtggaaaaacatctggcgaaagccccggcgaaagagtctgctccggcagcggctgctccggcggcgcaaccggctctggctgcacgtagtgaaaaacgtgtcccgatgactcgcctgcgtaagcgtgtggcagagcgtctgctggaagcgaaaaactccaccgccatgctgaccacgttcaacgaagtcaacatgaagccgattatggatctgcgtaagcagtacggtgaagcgtttgaaaaacgccacggcatccgtctgggctttatgtccttctacgtgaaagcggtggttgaagccctgaaacgttacccggaagtgaacgcttctatcgacggcgatgacgtggtttaccacaactatttcgacgtcagcatggcggtttctacgccgcgcggcctggtgacgccggttctgcgtgatgtcgataccctcggcatggcagacatcgagaagaaaatcaaagagctggcagtcaaaggccgtgacggcaagctgaccgttgaagatctgaccggtggtaacttcaccatcaccaacggtggtgtgttcggttccctgatgtctacgccgatcatcaacccgccgcagagcgcaattctgggtatgcacgctatcaaagatcgtccgatggcggtgaatggtcaggttgagatcctgccgatgatgtacctggcgctgtcctacgatcaccgtctgatcgatggtcgcgaatccgtgggcttcctggtaacgatcaaagagttgctggaagatccgacgcgtctgctgctggacgtgtagtagtttaagtttcacctgcactgtagaccggataaggcattatcgccttctccggcaattgaagcctgatgcgacgctgacgcgtcttatcaggcctacgggaccaccaatgtaggtcggataaggcgctagcgccgcatccgacaagcgatgcctgatgtgacggttaacgtgtcttatcaggcctacggggaccaccaatgtaggtcggataaggcgcaagcgccgcatccgacaagcgatgcctgatgtgacgtttaacgtgtcttatcaggcctacgggtgaccgacaatgcccggaagcgatacgaaatattcggtctacggtttaaaagataacgattactgaaggatggacagaacacatgaacttacatgaatatcaggcaaaacaactttttgcccgctatggcttaccagcaccggtgggttatgcctgtactactccgcgcgaagcagaagaagccgcttcaaaaatcggtgccggtccgtgggtagtgaaatgtcaggttcacgctggtggccgcggtaaagcgggcggtgtgaaagttgtaaacagcaaagaagacatccgtgcttttgcagaaaactggctgggcaagcgtctggtaacgtatcaaacagatgccaatggccaaccggttaaccagattctggttgaagcagcgaccgatatcgctaaagagctgtatctcggtgccgttgttgaccgtagttcccgtcgtgtggtctttatggcctccaccgaaggcggcgtggaaatcgaaaaagtggcggaagaaactccgcacctgatccataaagttgcgcttgatccgctgactggcccgatgccgtatcagggacgcgagctggcgttcaaactgggtctggaaggtaaactggttcagcagttcaccaaaatcttcatgggcctggcgaccattttcctggagcgcgacctggcgttgatcgaaatcaacccgctggtcatcaccaaacagggcgatctgatttgcctcgacggcaaactgggcgctgacggcaacgcactgttccgccagcctgatctgcgcgaaatgcgtgaccagtcgcaggaagatccgcgtgaagcacaggctgcacagtgggaactgaactacgttgcgctggacggtaacatcggttgtatggttaacggcgcaggtctggcgatgggtacgatggacatcgttaaactgcacggcggcgaaccggctaacttccttgacgttggcggcggcgcaaccaaagaacgtgtaaccgaagcgttcaaaatcatcctctctgacgacaaagtgaaagccgttctggttaacatcttcggcggtatcgttcgttgcgacctgatcgctgacggtatcatcggcgcggtagcagaagtgggtgttaacgtaccggtcgtggtacgtctggaaggtaacaacgccgaactcggcgcgaagaaactggctgacagcggcctgaatattattgcagcaaaaggtctgacggatgcagctcagcaggttgttgccgcagtggaggggaaataatgtccattttaatcgataaaaacaccaaggttatctgccagggctttaccggtagccaggggactttccactcagaacaggccattgcatacggcactaaaatggttggcggcgtaaccccaggtaaaggcggcaccacccacctcggcctgccggtgttcaacaccgtgcgtgaagccgttgctgccactggcgctaccgcttctgttatctacgtaccagcaccgttctgcaaagactccattctggaagccatcgacgcaggcatcaaactgattatcaccatcactgaaggcatcccgacgctggatatgctgaccgtgaaagtgaagctggatgaagcaggcgttcgtatgatcggcccgaactgcccaggcgttatcactccgggtgaatgcaaaatcggtatccagcctggtcacattcacaaaccgggtaaagtgggtatcgtttcccgttccggtacactgacctatgaagcggttaaacagaccacggattacggtttcggtcagtcgacctgtgtcggtatcggcggtgacccgatcccgggctctaactttatcgacattctcgaaatgttcgaaaaagatccgcagaccgaagcgatcgtgatgatcggtgagatcggcggtagcgctgaagaagaagcagctgcgtacatcaaagagcacgttaccaagccagttgtgggttacatcgctggtgtgactgcgccgaaaggcaaacgtatgggccacgcgggtgccatcattgccggtgggaaagggactgcggatgagaaattcgctgctctggaagccgcaggcgtgaaaaccgttcgcagcctggcggatatcggtgaagcactgaaaactgttctgaaataaatatctgtaataagaaatagccctcgccgcttccctctacaggaatggcgaagggctgtcggtttcgacatggttggccatcgtatgatggccttttttgtgcttatcgcgatgattttcgctgcgctatcagggtaaatttatagtcatcggtattaaaagcgttgcggctatattcaaacacccgaccatcaactaaatatccacgcgatactttttcaagaatcggttttgtctggctgatattaagcagacggctcatctcttcggttggcatcagaggaatgatttcctgttcgctacgatcgataaccattttcttcacttcttcgataaagtgatatttcgaattttccatgacctgccaggtgagatccgggaacaacgcaagcggcatccaggtttcttccagcgccattggcttttgcttgcgatagcgcacgcgcttcacatgccacacacgatcctgcggggtgatttgtagctgttgctgaagaaaatcgtcagccggaatcacttcgaatatcagaacttcactgtgtgtatcgacgtgacggtccgacagtttttcatcaaaactggttaactgaaaaatatcgtaattgacccgctcttctttgacgtaagtcccgctgccctgaatgctttcgaggatctgctgctcgactagctggcgcaaagcctgacgcaccgtaacccggctgacgccaaactctgtttgtagcgctgattcagtgggtaacgcatcgccaggtttaagctcgccacgcgcaatttgttcacgaatgcgatcggcaatctgccggtataagggcttgtgtcccatttttagtatctcattaatacgaatttaaccattatgcccgataaattcatcctgtaaataatacaaatacaatacaaataatttcaatcaagtgaaattgatcacataatggtattgttttatcgggcacactggcgcgactataaaaacgatcaagtgaggatcatgatgaatctgacgactctgacccaccgcgatgcgttgtgtctgaatgcgcgctttaccagccgtgaagaggccatccacgcgttgactcaacgtcttgctgctctggggaaaatttccagtactgagcaatttctggaagaagtgtatcgccgtgaaagccttggcccgaccgccttaggtgaagggttggctgtgccgcatggcaaaactgctgcggtaaaagaagcggcgtttgcggtcgccacactcagcgagccgcttcagtgggaaggcgttgatggcccggaagcagttgatttagtggtgctgctggcgattccccccaatgaagcgggtactacgcatatgcaactgctgacagcgctgaccacgcgccttgcggatgatgagattcgggcgcgtatacagtcggcgacgacgcctgatgagttgctctcggcgctggatgacaagggaggcacgcaaccttctgcctctttttccaacgcgccaactatcgtctgcgtaacggcctgtccggcgggtattgctcacacctatatggctgcggaatatctggaaaaagccggacgcaaactcggcgtaaatgtttacgttgaaaaacaaggcgctaacggcattgaagggcgtttaacggcggatcaactcaatagtgcaaccgcctgtatttttgcggctgaagtcgccatcaaggagagtgagcgttttaatggcattcccgcgctttcagtgcctgttgccgagccgattcgccatgcagaagcgttgatccaacaagcgcttaccctcaagcgtagcgatgagacgcgtaccgtacagcaagatacgcaaccggtgaaaagtgtcaaaacggagctgaaacaggcactgttgagcggaatctcttttgccgtaccgttgattgtcgcggggggcacggtgctggcggtcgcggtattactgtcgcaaatcttcgggctacaagatctgtttaatgaagaaaactcctggctgtggatgtaccgcaagctgggcggcgggctgctcggaattttgatggtaccggtgctcgcggcctataccgcctattctctggcagataaaccggcgttagcgccaggctttgcggctggacttgccgccaacatgatcggctccgggtttctcggcgcggtcgttggcggattgatagccggttacttgatgcgctgggtgaaaaatcacttgcgtcttagcagtaaattcaatggattcctgactttttatctctacccggtgctcggtacgttgggagcgggcagtctgatgctgtttgtggtgggggaacctgtcgcctggatcaataactcgcttaccgcctggctgaacggtctgtcaggaagtaacgcgctgttgctgggtgccattctcggttttatgtgttcctttgaccttggagggccagtgaataaagccgcttatgcattctgcctgggcgcaatggcgaacggcgtttacggcccgtatgccattttcgcctccgtcaaaatggtttcggcatttaccgtaaccgcttccacgatgctcgcaccgcgcctgtttaaagagtttgaaattgagaccgggaaatccacctggctgttagggctggcaggtattaccgaaggggcgatcccgatggcgattgaagatccgctgcgggttattggttcgtttgtgctgggctctatggtaacgggcgctattgtcggtgcgatgaatatcggcctttcgacacccggtgccggtattttctcgctctttttacttcatgataatggcgcgggcggtgttatggcggcaattggctggtttggcgcggcattggtgggggctgcaatctcgactgcaattctcctgatgtggcggcgtcacgcggttaagcatggcaactatctgactgatggcgtaatgccataaacaaaaaggaaacgacgatgaaagcagtatctcgcgttcacatcaccccgcatatgcactgggatcgagagtggtatttcaccaccgaagagtcacgtattctgctggtcaataatatggaagagatcctgtgccgactggaacaggacaacgaatacaaatattacgtactcgacgggcaaacggcgatcctcgaagattatttcgcggtgaaaccggaaaacaaagaccgtgtgaagaaacaggtagaagtcggcaagttgattatcggcccctggtatacccagaccgataccacgattgtttctgcggaatccatcgtccgtaatctgatgtacggaatgcgtgactgcctcgcgtttggcgagccgatgaaaataggttatttaccagattcctttggcatgtccgggcaactgccgcatatctacaatggatttggcattacccgcaccatgttctggcgcggatgttcggagcgccacggtactgataaaaccgagtttttgtggcaaagcagtgacggtagcgaagtgacggcgcaggtgctgccgctgggctacgccatcggtaagtacttacctgccgacgaaaacggattacgtaaacgcctcgacagttattttgacgtgctggaaaaagcgtctgtaaccaaagagattttgctgccgaatgggcatgaccagatgccattgcagcaaaatatcttcgaagtgatggataagctacgtgagatctaccctcaacgtaagtttgtgatgagccgctttgaagaggtatttgagaagatcgaagcgcagcgagataatctggcaaccctgaaaggggaatttattgatggcaaatatatgcgcgtgcatcgcaccatcggttctacgcgtatggatatcaaaattgcccacgcgcgtattgaaaataagattgttaatctgctggaaccgctggcaacactggcctggacgttgggttttgaataccaccacggcttgctggagaaaatgtggaaagagatcttaaaaaatcatgcccacgacagtatcggctgctgctgtagtgacaaagttcatcgcgaaatcgtcgcccgcttcgaactggctgaagacatggcggataatctgattcgtttctacatgcgcaaaattgccgacaacatgccgcagagcgacgccgacaaactcgtcctgtttaacctgatgccctggccgcgtgaagaagttatcaacaccactgtgcggctgtgcgccagccagtttaatttgcgggacgatcgcggtcagcctgtaccgtattttattcgccatgcccgtgagatcgatccaggcctaatcgatcggcaaatagttcattacggtaattacgatccctttatggagtttgatatacagatcaaccagattgtcccttctatgggctatcgcacgctttatatcgaagcgaatcagcctggcaacgtaattgcggcaaaaagtgacgctgaagggatactggaaaatgctttctggcaaattgcgctcaatgaggatggttctctgcaactggtagataaagacagcggtgtgcgctatgaccgggtattgcaaattgaagaaagctctgatgatggtgatgaatatgactattcacccgcaaaagaagagtgggtaattaccgcagcgaacgcgaaaccgcaatgcgatattattcatgaagcctggcagagcagggctgttatccgctatgacatggcagtgccgctcaatttgtcagaacgcagcgcccggcaatccactggcagagtaggggtggtgttggttgtcactcttagtcataacagcaggcgtattgatgtggatatcaatcttgataaccaggctgacgatcatcgccttcgtgtcctggtccctacaccttttaacaccgacagtgttctggcagatacgcagtttggttcgctaacgcgccccgtgaacgacagtgcaatgaacaactggcagcaagaaggctggaaagaagcgccggttccggtatggaatatgctcaactatgttgccttacaggaagggcgtaacggcatggctgtctttagcgaagggttacgtgaatttgaagtcatcggtgaagagaagaaaacctttgccattacgttgctgcgtggcgtgggcttactgggcaaagaagatctgcttttaaggcctgggcggccttcgggaattaaaatgccagtcccggactcacaactacgtggtctgctttcttgtcgcctaagtttattgagttataccggtacgccaaccgccgctggtgtagctcagcaggcgcgagcatggctgactccagtacagtgttacaacaaaatcccatgggatgtgatgaagctcaacaaagccggattcaacgtgccggaaagttatagtttgttgaaaatgcccccagtgggatgcctgataagcgcacttaagaaagctgaagaccgacaagaagtgattttacggctgtttaatccggctgaatcagcaacctgtgatgcgactgttgctttcagtcgcgaggtgatttcttgctcagaaacgatgatggatgaacacattaccaccgaggaaaatcaaggttcaaatctatcggggccttttttacccggccagtcacggacgttcagttaccggcttgcctgaatagcaatcaaaccgaagccacatatgcgcggccagattgttgacaaagggcgctttgttcatgccggatacggcatgaacgctttattcggtctacaaaagcaggcaaattcaatatattgcagagatgatgtagacactggcaagcgtagcgcatcaggtaattttgcgtttatcttcactctcaagccacgtatatgtggctttatttttaacaaaataataaccctgggtgagttaattataatataattataagttaactaaatgttaatattggcggggtggatttatgcctttattagtaatcctgaaactctgcgtcgtattagccagtgaccaaaaaaagaattaaggtcaaccgtgctgtttttgcttcgtctctttttatctttaattgccaaccgaaactaatttcagccttataactcacacattttaaacataaatgtcactaaagttaccttattgaaacatgattaacataatttgtaggaattgatatttatcaatgtataagtcttggaaatgggcatcaaaaagagataaattgttctcgatcaaattggctgaaaggcggtaatttagctataaattgatcaccgtcgaaaaatgcaaatttgcttcaacaaaaacctgtttattgtaaggattttgcggcgtaatatatacgtgggatcaatttgagtttttattaacatgtttgcaacctttctttacgccgtttttgtgtgcattcacatggtatgatgaaagtgttcaaacaaatttctattggggcatgcgtgtgaccctttctaacggggttcactctcggagtcttcatgcgatgagcaaggagtcatgatgttagatatagtcgaactgtcgcgcttacagtttgccttgaccgcgatgtaccacttcctttttgtgccactgacgctcggtatggcgttcctgctggccattatggaaacggtctacgtcctctccggcaaacagatttataaagatatgaccaagttctggggcaagttgtttggtatcaacttcgctctgggtgtggctaccggtctgaccatggagttccagttcgggactaactggtcttactattcccactatgtaggggatatcttcggtgcgccgctggcaatcgaaggtctgatggccttcttcctcgaatccacctttgtaggtctgttcttcttcggttgggatcgtctgggtaaagttcagcatatgtgtgtcacctggctggtggcgctcggttcaaacctgtccgcactgtggattctggttgcgaacggctggatgcaaaacccaatcgcgtccgatttcaactttgaaactatgcgtatggagatggtgagcttctccgagctggtgcttaacccggttgctcaggtgaaattcgttcacactgtagcgtctggttatgtgactggcgcgatgttcatcctcggtatcagcgcatggtatatgctgaaaggtcgtgacttcgccttcgctaaacgctcctttgctatcgctgccagcttcggtatggctgctgttctgtctgttattgttctgggtgatgaatccggctacgaaatgggcgacgtgcagaaaaccaaactggctgctattgaagccgagtgggaaacgcaacctgcgcctgctgcctttactctgttcggcattcctgatcaggaagaggagacgaacaaatttgcgattcagatcccttacgcactgggcatcattgcaacgcgttccgtggataccccggttatcggcctgaaagagctgatggtgcagcatgaagaacgcattcgtaacgggatgaaggcgtactctctgctcgaacaactgcgttctggttctaccgaccaggcggttcgtgaccagttcaatagcatgaagaaagacctcggttacggtctgctgctgaaacgctatacgccaaacgtggctgatgcgactgaagcgcagattcaacaggcaaccaaagactccatcccgcgtgtagcgccgctgtactttgcgttccgtatcatggtggcgtgtggcttcctgcttctggcaatcatcgcgctctctttctggagtgtcatccgcaaccgcattggcgagaaaaaatggcttctgcgcgccgcgctgtacggtattccgctgccgtggattgctgtagaagcgggctggttcgtggctgaatatggccgccaaccgtgggctatcggtgaagtgctgccgacagctgtggcgaactcgtcactgaccgcaggcgatctcatcttctcaatggtgctgatttgcggcctgtataccctgttcctggtggcagaattgttcttaatgttcaagtttgcacgcctcggcccaagcagcctgaaaaccggtcgctatcactttgagcagtcttccacgactactcagccggcacgctaagacaggagtcgtcaaatgatcgattatgaagtattgcgttttatctggtggctgctggttggcgttctgctgattggttttgcagtcactgacggtttcgacatgggggtgggcatgctcacccgtttcctcggtcgtaacgacaccgagcgtcgaattatgattaactccattgcaccacactgggacggtaaccaggtttggctgatcaccgcgggcggcgcactctttgctgcctggccgatggtctatgccgctgcgttctccggcttctatgtggcgatgatcctcgtgctggcgtctttgttcttccgtccggtcggttttgactaccgctccaagattgaagaaacccgctggcgtaacatgtgggactggggcatcttcattggtagcttcgttccgccgctggtaattggtgtagcgttcggtaacctgttgcagggcgtaccgttcaacgttgatgaatatctgcgtctgtactacaccggtaacttcttccagttgcttaacccgttcggcctgctggcaggcgtggtgagcgtagggatgatcattactcagggcgcaacctatctgcaaatgcgtaccgtgggcgaactgcacctgcgtacccgtgcaacggctcaggtggctgcgctggtgacactggtctgtttcgcactggctggcgtatgggtgatgtacggtatcgatggttatgtcgtgaaatcgacaatggaccattacgcagcctctaacccactgaataaagaagtggttcgtgaagctggcgcatggctggttaacttcaacaacacgccaattctgtgggctattccggcactgggtgtggttctgccgctgctgaccatcctgactgcacgtatggataaagccgcgtgggcgtttgtgttctcctccctgacgctggcctgcatcatcctgacagccggtatcgcaatgttcccgtttgtgatgccgtccagcaccatgatgaacgcaagtctgacaatgtgggatgcaacttccagccagctgacgcttaacgtcatgacctgggttgcggtggttctggtaccgatcattctgctctacaccgcctggtgttactggaaaatgttcggtcgtatcaccaaagaagatattgaacgtaacacccactctctgtactaagtaaggagctaaaaatgtggtatttcgcatggattctgggaacgcttcttgcctgttcgtttggggtaatcaccgcgctggcgcttgaacacgtcgaatcaggcaaagccggtcaagaagacatctgatgagtaagattatcgcgactttgtatgcggtaatggacaagcgccccctgcgggcgctttccttcgtgatggcgcttctgttagcaggatgtatgttttgggacccatctcgttttgccgcgaagaccagtgaactggaaatctggcatggtttattgctgatgtgggccgtctgtgctggtgtgattcacggcgtgggctttcgtccgcagaaggttctttggcaagggattttttgcccattgcttgccgatattgttctcattgtcgggctgattttcttcttcttttaaatcagaattctctttaaaaaattatgggccgctccaggcccataaatttttacgctcccttaacttgccctcattcccaaacctcaatcgcgcgcgtatagtagcagcgtttaaaagctctaacttttgttgcattaccgggatgtaaagtgaatacaacgctgtttcgatggccggttcgcgtctactatgaagataccgatgccggtggtgtggtgtaccacgccagttacgtcgctttttatgaaagagcacgcacagagatgctgcgtcatcatcacttcagtcagcaggcgctgatggctgaacgcgttgcctttgtggtacgtaaaatgacggtggaatattacgcacctgcgcggctcgacgatatgctcgaaatacagactgaaataacatcaatgcgtggcacctctttggttttcacgcaacgtattgtcaacgccgagaatactttgctgaatgaagcagaggttctggttgtttgcgttgacccactcaaaatgaagcctcgtgcgcttcccaagtctattgtcgcggagtttaagcagtgactgacatgaatatccttgatttgttcctgaaggctagccttctggttaaacttatcatgttgattttgattggtttttcaatcgcatcttgggccattattatccagcggacccgtattcttaacgcagcggcgcgcgaagccgaagcgtttgaagataaattctggtctggaatcgaactctctcgcctctatcaagagagccaggggaaacgggataatctgactggttcggaacaaatcttttacagcgggttcaaagagtttgtgcgcctgcatcgtgccaatagccatgcgccggaagccgtagtggaaggggcgtcgcgtgctatgcgtatctccatgaaccgtgaacttgaaaatctggaaacgcacattccgttcctcggtacggttggctccatcagcccgtatattggtctgtttggtacggtctgggggatcatgcacgcctttatcgccctcggggcggtaaaacaagcaacactgcaaatggttgcgcccggtatcgcagaagcgttgattgcgactgcaattggtctgtttgccgctatcccggcagttatggcctacaaccgcctcaaccagcgcgtaaacaaactggaactgaattacgacaactttatggaagagtttaccgcgattctgcaccgccaggcgtttaccgttagcgagagcaacaaggggtaagccatggccagagcgcgtggacgaggtcgtcgcgatctcaagtccgaaatcaacattgtaccgttgctggacgtactgctggtgctgttgctgatctttatggcgacagcgcccatcatcacccagagcgtggaggtcgatctgccagacgctactgaatcacaggcggtgagcagtaacgataatccgccagtgattgttgaagtgtctggtattggtcagtacaccgtggtggttgagaaagatcgcctggagcgtttaccaccagagcaggtggtggcggaagtgtccagccgtttcaaggccaacccgaaaacggtctttctgatcggtggcgcaaaagatgtgccttacgatgaaataattaaagcactgaacttgttacatagtgcgggtgtgaaatcggttggtttaatgacgcagcctatctaaacatctgcgtttcccttgcttgaaagagagcgggtaacaggcgaacagtttttggaaaccgagagtgtcaaaggcaaccgaacaaaacgacaagctcaagcgggcgataattatttcagcagtgctgcatgtcatcttatttgcggcgctgatctggagttcgttcgatgagaatatagaagcttcagccggaggcggcggtggttcgtccatcgacgctgtcatggttgattcaggtgcggtagttgagcagtacaaacgcatgcaaagccaggaatcaagcgcgaagcgttctgatgaacagcgcaagatgaaggaacagcaggctgctgaagaactgcgtgagaaacaagcggctgaacaggaacgcctgaagcaacttgagaaagagcggttagcggctcaggagcagaaaaagcaggctgaagaagccgcaaaacaggccgagttaaagcagaagcaagctgaagaggcggcagcgaaagcggcggcagatgctaaagcgaaggccgaagcagatgctaaagctgcggaagaagcagcgaagaaagcggctgcagacgcaaagaaaaaagcagaagcagaagccgccaaagccgcagccgaagcgcagaaaaaagccgaggcagccgctgcggcactgaagaagaaagcggaagcggcagaagcagctgcagctgaagcaagaaagaaagcggcaactgaagctgctgaaaaagccaaagcagaagctgagaagaaagcggctgctgaaaaggctgcagctgataagaaagcggcagcagagaaagctgcagccgacaaaaaagcagcagaaaaagcggctgctgaaaaggcagcagctgataagaaagcagcggcagaaaaagccgccgcagacaaaaaagcggcagcggcaaaagctgcagctgaaaaagccgctgcagcaaaagcggccgcagaggcagatgatattttcggtgagctaagctctggtaagaatgcaccgaaaacggggggaggggcgaaagggaacaatgcttcgcctgccgggagtggtaatactaaaaacaatggcgcatcaggggccgatatcaataactatgccgggcagattaaatctgctatcgaaagtaagttctatgacgcatcgtcctatgcaggcaaaacctgtacgctgcgcataaaactggcacccgatggtatgttactggatatcaaacctgaaggtggcgatcccgcactttgtcaggctgcgttggcagcagctaaacttgcgaagatcccgaaaccaccaagccaggcagtatatgaagtgttcaaaaacgcgccattggacttcaaaccgtaatcgcgatgttgactgttcggacggtcaacatcaggcaccggttgccacggggttctggtagttttgtgtattttagtttgttaacattctgctaaattatcgtgggccatcggtccagataagggagatatgatgaagcaggcattacgagtagcatttggttttctcatactgtgggcatcagttctgcatgctgaagtccgcattgtgatcgacagcggtgtagattccggtcgtcctattggtgttgttcctttccagtgggcggggcctggtgcggcacctgaagatattggcggcatcgttgctgctgacttgcgtaacagcggtaaatttaatccgttagatcgcgctcgtctgccacagcagccgggtagtgcgcaggaagtacaaccagctgcatggtccgcactgggcattgacgctgtagttgtcggtcaggtcactccgaatccggatggttcttacaatgttgcttatcaacttgttgacactggcggcgcaccgggtactgtacttgctcagaactcgtacaaagtgaacaagcagtggctgcgttatgctggtcataccgccagtgatgaagtgtttgaaaaactgaccggcattaaaggtgcgttccgtactcgtattgcctacgttgttcagaccaacggcggtcagttcccgtatgaactgcgcgtatctgactatgacggttacaaccagtttgtcgttcaccgttcaccgcagccgctgatgtctccggcgtggtcaccagacggttctaaactggcttatgtgaccttcgaaagcggtcgttccgcgctggttattcagacgctggcaaatggcgctgtacgtcaggtggcttcattcccgcgtcacaacggtgcacctgcattctcgccagacggcagcaaactggcattcgccttgtcgaaaaccggtagtctgaacctgtacgtaatggatttggcttctggtcagatccgccaggtgactgatggtcgcagtaacaataccgaaccgacctggttcccggatagccagaacctggcatttacttctgaccaggccggtcgtccgcaggtttataaagtgaatatcaacggcggtgcgccacaacgtattacctgggaaggttcgcagaaccaggatgcggatgtcagcagcgacggtaaatttatggtaatggtcagctccaatggtgggcagcagcacattgccaaacaagatctggcaacgggaggcgtacaagttctgtcgtccacgttcctggatgaaacgccaagtctggcacctaacggcactatggtaatctacagctcttctcaggggatgggatccgtgctgaatttggtttctacagatgggcgtttcaaagcgcgtcttccggcaactgatggacaggtcaaattccctgcctggtcgccgtatctgtgataataattaattgaatagtaaaggaatcattgaaatgcaactgaacaaagtgctgaaagggctgatgattgctctgcctgttatggcaattgcggcatgttcttccaacaagaacgccagcaatgacggcagcgaaggcatgctgggtgccggcactggtatggatgcgaacggcggcaacggcaacatgtcttccgaagagcaggctcgtctgcaaatgcaacagctgcagcagaacaacatcgtttacttcgatctggacaagtacgatatccgttctgacttcgctcaaatgctggatgcacatgcaaacttcctgcgtagcaacccgtcttacaaagtcaccgtagaaggtcacgcggacgaacgtggtactccggaatacaacatctccctgggtgaacgtcgtgcgaacgccgttaagatgtacctgcagggtaaaggcgtttctgcagaccagatctccatcgtttcttacggtaaagaaaaacctgcagtactgggtcatgacgaagcggcatactccaaaaaccgtcgtgcggtactggtttactaagagaattgcatgagcagtaacttcagacatcaactattgagtctgtcgttactggttggtatagcggccccctgggccgcttttgctcaggcaccaatcagtagtgtcggctcaggctcggtcgaagaccgcgtcactcaacttgagcgtatttctaatgctcacagccagcttttaacccaactccagcaacaactttctgataatcaatccgatattgattccctgcgtggtcagattcaggaaaatcagtatcaactgaataaggtcgtggagcggcaaaagcagatcctgttgcagatcgacagcctcagcagcggtggtgcagcggcgcaatcaaccagcagcgatcaaagcggtgcggcggcatcaacgacgccgacagctgatgctggtactgcgaatgctggcgcgccggtgaaaagcggcgatgcaaacacggattacaatgcagctattgcgctggtgcaggataaatcccgccaggatgacgcaatggtggcatttcagaatttcatcaaaaattaccctgattcaacttacctgccaaacgccaattattggctgggtcagttaaactacaacaagggtaaaaaagatgatgcggcgtactattttgcttcggtagtgaaaaactatccgaagtcaccaaaggctgctgatgcgatgtttaaagtcggcgtcatcatgcaggacaaaggtgacaccgcaaaagcgaaagccgtataccagcaggttatcagtaaataccctggtactgatggcgctaaacaggcacaaaaacgtctgaacgcgatgtaatgcataacacacgaccagaagtcgcattatttctggtcgtgtcgtgcgaatcataagcagttgagtgatctgcatcgaaatttttgttgcgctcaagtctgaaatcagtaatatatgccgccgttgccacgggatatcaaacaaaccgaaagcaacgaaaaagtgggtcgttagctcagttggtagagcagttgacttttaatcaattggtcgcaggttcgaatcctgcacgacccaccaatcgctaaggtggaagcggtagtaaaacgtgaaggataacgttgcatcagcaacggcccgaagggcgagacgaagtcgagtcatcctgcacgacccaccactaacatagttagttgtagtatccagcgtagtattgggtgattagctcagctgggagagcacctcccttacaaggagggggtcggcggttggagcacctcaaaaacaccatcatacactaaatcagtaagttggcagcatcacctggattcgtctgccatttcctgatttttatatttatatactctaaataattcgagtcgcagtacatgcaacttgaagtatgacgagtataaatggaatggtacatgggcaaatatattcgtcccttatccgatgcggtatttaccatcgcatctgatgacctgtggatcgagagtttagcgatccaacaattacacaccacagcaaatttacccaacatgcagcgcgtagtggggatgccagatttacaccccggacgcggctacccgattggcgcagcgttcttctctgttggtcgtttttacccgacaagacgtcgctgtaacggtgctggaaacagaaacgggccgctactctgacacgctgcgttcggcgctggtttctctggatggcgataacgcatgggcattaagcgaaagctggtgtggcactattcagtggatttgtccgagtccgtatcggcctcatcatgggcgcaaaaactggtttctgggcattgggcgttttaccgctgatgagaaggaacaatcggatgcaatccgttatgagacgctgcgttcgtcggggccgggcggtcaacatgtcaataaaaccgactcggcggtacgcgccacgcatctggcatccggtattagcgtgaaggttcagtcagagcgcagccagcatgctaacaaacggctggcgcgattgctgattgcctggaagctggagcagcagcaacaggaaaatagcgcggcgctgaaatcgcagcggcgaatgttccatcaccagattgaacgtggcaacccgcgacggacatttacagggatggcttttatcgaaggataatgaaggatgaaactgccggaaggcgattaaacgccatccggcagcaaatcaaataattacttcgccggaatttctttcagcagttcagtcagcagtgtccagtaatgacctacgcttttgatgtgaacttgctcatccggagagtgtggaccggtgatagttggcccgatagaaaccatgtccatttccggatacggttttttaaacagaccacattccaggcccgcgtggataatctggatgttcggcgtcttgttgaacaggcgctgataggtttcacgtaccagatgcatcaccggagaattagcgtccggctgccagccaggatatgcgcctttcgcttcggttttcgcgccagccagtttacccagcgaatccagcatgctcaccacgtagtctttaccgctgtcgatcagtgaacggatcaggcagtgaatttctacgttattgtcagtcatggtcaccacaccgacgttcagggaggtttcgaccacaccttttgccacgtcggaattgcggatcacaccgttcggggtggcgttcagcagacgaataaaggtatcgcgagatttcgcaatcagagcagctttatcgttcgctacagagtccagcaacaaggccagattcttctctttctctgccagctcgtttttcaggatgtcctgataggtattcaccagagatttcagggcgtcgactttatcagctgcgacagcaatggtcgcaaaggcttcacgcgggatggcgttacgcagtgtgccaccgttgaaatcgataaggcgcaggtccagctcttccgcatgacccgccaggaagcgcaccagcagtttgttggcattacccaggccaacgtggatttcaccgccggagtgaccgccttttagaccttttaaggttaacttgaaggtttcaaagccagctggaaccgcttcacgatccaaatgcaggttggaggtgaagtcgataccccccgcgcaacccatgtagatttcaccttcttcttcggagtcggtgttaatcagaatatcagcctgcaaccagttgctctgtaagccgaacgcaccgtccataccggcttcttcggtcatggtcagcagcacttccagcgggccgtgaaccacgttttcgtcagccagaaccgccagcgcagacgccataccaatgccgttatctgcacccagcgtggtgccgcgcgctttaacccattcgccatcaatataaggctggataggatctttcgtgaagtcatgcacggtgtcgttatttttctgcggcaccatatcgaggtgggcctgcaagacgaccggtttacgattttccatacctgcggtggcaggtttacgaatcaggatattacctacctgatcgcgttcgacatggaaacctttctcttttgcccaaccaacaatgtattcagcgagttgctcttcatgataggacgggtgaggaatagaacagattttggcaaaaatatcccacagcggctgtggagataattgagacagttcagacacgttaagtctccttgtcgatcacccgcaaaacagtattgcaggtcacagggttagcagaaaatgttgtcaacacaagacaggcttgcgagatatgtttgagaataccactttatcccgcgtcagggagaggcagtgcgtaaaaagacgcggactcatgtgaaatactggtttttagtgcgccagatctctataatctcgcgcaacctattttcccctcgaacactttttaagccgtagataaacaggctgggacacttcacatgagcgaaaaatacatcgtcacctgggacatgttgcagatccatgcacgtaaactcgcaagccgactgatgccttctgaacaatggaaaggcattattgccgtaagccgtggcggtctggtaccgggtgcgttactggcgcgtgaactgggtattcgtcatgtcgataccgtttgtatttccagctacgatcacgacaaccagcgcgagcttaaagtgctgaaacgcgcagaaggcgatggcgaaggcttcatcgttattgatgacctggtggataccggtggtactgcggttgcgattcgtgaaatgtatccaaaagcgcactttgtcaccatcttcgcaaaaccggctggtcgtccgctggttgatgactatgttgttgatatcccgcaagatacctggattgaacagccgtgggatatgggcgtcgtattcgtcccgccaatctccggtcgctaatcttttcaacgcctggcactgccgggcgttgttctttttaacttcaggcgggttacaatagtttccagtaagtattctggaggctgcatccatgacacaggcaaacctgagcgaaaccctgttcaaaccccgctttaaacatcctgaaacctcgacgctagtccgccgctttaatcacggcgcacaaccgcctgtgcagtcggctcttgatggtaaaaccatccctcactggtatcgcatgattaaccgtctgatgtggatctggcgcggtattgacccacgtgaaatcctcgacgtccaggcacgtattgtgatgagcgatgctgaacgtaccgacgatgatttatacgatactgtgattggctaccgtggtggcaactggatttatgagtgggccacccaggcgatggtgtggcaacaaaaagcctgtgcggaagaagatccgcaactcagtggtcgtcactggctgcatgcggctacgttgtataacattgctgcctatcctcatctgaaaggagatgacctggccgagcaagcgcaggctttgtcaaaccgcgcctatgaagaggccgctcagcgtctgccgggcacgatgcggcagatggagtttaccgtacccggcggtgcgcccatcaccggctttttgcatatgccgaaaggcgatggcccgttcccgacagtattaatgtgtggtggtctggatgcgatgcagacggactattacagcctgtacgaacgttattttgcgccgcgcggcattgcgatgctgactattgatatgccgtcggtgggcttttcttcaaaatggaagctgacccaggactccagcctgttgcatcagcacgtcttaaaggcgctgcctaacgtaccgtgggtggatcacactcgcgtcgcggcctttggtttccgtttcggcgctaacgttgccgtgcgtctggcataccttgaatcgccgcgtctgaaagcggttgcctgtcttggtccggtagttcataccctgttgagtgattttaagtgccagcaacaggtgccggaaatgtatcttgacgttctggcgagtcgtttggggatgcatgatgcttccgacgaagcgttgcgcgtggagctgaatcgctattcattaaaagtgcaaggattgctgggacgtcgctgcccaacgccaatgttatcgggctactggaagaacgatccgttcagcccggaagaggactcacgcttaatcacctcatcatctgctgacggtaaattattagagatcccatttaacccggtgtatcggaattttgacaaaggtcttcaggaaatcacagactggatcgaaaaacgtttgtgttaaaaatttgctaaaatttgccaatttggtaaaacagttgcatcacaacaggagattgcaatgacgttaccgagtggacacccgaagagcagattgatcaaaaaatttaccgcactaggcccgtatattcgtgaaggtaagtgcgaagataatcgattctttttcgattgtctggctgtatgcgtcaacgtgaaaccggcaccggaagtgcgtgagttctggggctggtggatggagcttgaagcgcaggaatcccgttttacctacagttaccagtttggtctgttcgataaagcaggcgactggaagagtgttccggtaaaagacactgaagtggttgaacgactggagcacaccctacgtgagtttcacgagaagctgcgtgaactgctgacgacgctgaatctgaagctggaaccggcggatgattttcgtgatgaaccggtgaagttaacggcgtgagtgaaatgtgccggatgtatcacatccggcaatatccattaaaactgataggtcatgccaaccgcgacaatatcatcattattaatattcaatttgttatcgctatccagtttgttgattttataatcaacaaacgctgacatatttttgttgaaataatacgtagcaccgacgtcgatataattgaccagatcttcatcaccgataccttcaatatctttccctttcgataagacataacccagcgatggacgcagaccaaagtcaaactggtattgagcgaccgcttcaaagttctgtgtcttattggcaaagccgccagttattggcgtcattttgcgtgtttcagaatagaaagttgccagataaatattattggcatcgtatttcagacctgttgcccatgcttctgcacgcttgcctgtgccacggctttgcaggttctgctcgttggtgcgatctgagttggtataggccccactaatggcgaaatcgctgccgccaaagtcatatgtcaatgacgtgccgaagccatcgccgttttgctttttaacgtcgcggttttcgtttttcccttgatattgcagggttaagttcaggccatcgataacgccgaagaagtcggtgttccgatacgtcgccagaccgctggcgcgtttggtcataaagttgtcggtctgcgccgaggaatcgccaccaaattccgggaacatatcggtccaggcttccacgtcatacaacgcccccaggttacgaccataatcgaaagaacccaaatctttatatttcaacccggcaaaagcgagacgcgttttttgctgtgcagtatcactctctgctttattaccggcaaactctgcttcccaacgaccataaccagtcagttgatcgttaatttgtgtttcgcctttaaaaccaaaacggatataactctggtcgccatctttactggcgttatcactcatataatgcatggctttaactttgccatagacatccagtttattaccgtctttattatatatttctgcagcctgtacagatgcagatgccacaatgcccatcaccactaatgccagagtgctctttttcattttcattcctgattttaattaacgcgcgaatattcagcgggagagtcccgttgaaaacaggaaagtttttaacctgagattgttaaagatatattacagattaataatattcttaaaatgtggtaatttattaaatctgtaataaaagcgtaaacaactgccgctaggcttgctgatcccgcgcaacaaaacgccatgctttgctcgcagatggttggcaaccgacgacagtcctgctaaaacgttcgtttgatatcatttttcctaaaattgaatggcagagaatcatgagtgacagccagacgctggtggtaaaactcggcaccagtgtgctaacaggcggatcgcgccgtctgaaccgtgcccatatcgttgaacttgttcgccagtgcgcgcagttacatgccgccgggcatcggattgttattgtgacgtcgggcgcgatcgccgccggacgtgagcacctgggttacccggaactgccagcgaccatcgcctcgaaacaactgctggcggcggtagggcagagtcgactgattcaactgtgggaacagctgttttcgatttatggcattcacgtcgggcaaatgctgctgacccgtgctgatatggaagaccgtgaacgcttcctgaacgcccgcgacaccctgcgagcgttgctcgataacaatatcgttccggtaatcaatgagaacgatgctgtcgctacggcagagattaaggtcggcgataacgataacctttctgcgctggcggcgattcttgcgggtgccgataaactgttgctgctgaccgatcaaaaaggtttgtataccgctgacccgcgcagcaatccgcaggcagaactgattaaagatgtttacggcattgatgacgcactgcgcgcgattgccggtgacagcgtttcaggcctcggaactggcggcatgagtaccaaattgcaggccgctgacgtggcttgccgtgcgggtatcgacaccattattgccgcgggcagcaagccgggcgttattggtgatgtgatggaaggcatttccgtcggtacgctgttccatgcccaggcgactccgcttgaaaaccgtaaacgctggattttcggtgcgccgccggcgggtgaaatcacggtagatgaaggggcaactgccgccattctggaacgcggcagctccctgttgccgaaaggcattaaaagcgtgactggcaatttctcgcgtggtgaagtcatccgcatttgcaacctcgaaggccgcgatatcgcccacggcgtcagtcgttacaacagcgatgcattacgccgtattgccggacaccactcgcaagaaattgatgcaatactgggatatgaatacggcccggttgccgttcaccgtgatgacatgattacccgttaaggagcaggctgatgctggaacaaatgggcattgccgcgaagcaagcctcgtataaattagcgcaactctccagccgcgaaaaaaatcgcgtgctggaaaaaatcgccgatgaactggaagcacaaagcgaaatcatcctcaacgctaacgcccaggatgttgctgacgcgcgagccaatggccttagcgaagcgatgcttgaccgtctggcactgacgcccgcacggctgaaaggcattgccgacgatgtacgtcaggtgtgcaacctcgccgatccggtggggcaggtaatcgatggcggcgtactggacagcggcctgcgtcttgagcgtcgtcgcgtaccgctgggggttattggcgtgatttatgaagcgcgcccgaacgtgacggttgatgtcgcttcgctgtgcctgaaaaccggtaatgcggtgatcctgcgcggtggcaaagaaacgtgtcgcactaacgctgcaacggtggcggtgattcaggacgccctgaaatcctgcggcttaccggcgggtgccgtgcaggcgattgataatcctgaccgtgcgctggtcagtgaaatgctgcgtatggataaatacatcgacatgctgatcccgcgtggtggcgctggtttgcataaactgtgccgtgaacagtcgacaatcccggtgatcacaggtggtataggcgtatgccatatttacgttgatgaaagtgtagagatcgctgaagcattaaaagtgatcgtcaacgcgaaaactcagcgtccgagcacatgtaatacggttgaaacgttgctggtgaataaaaacatcgccgatagcttcctccccgcattaagcaaacaaatggcggaaagcggcgtgacattacacgcagatgcagctgcactggcgcagttgcaggcaggccctgcgaaggtggttgctgttaaagccgaagagtatgacgatgagtttctgtcattagatttgaacgtcaaaatcgtcagcgatcttgacgatgccatcgcccatattcgtgaacacggcacacaacactccgatgcgatcctgacccgcgatatgcgcaacgcccagcgttttgttaacgaagtggattcgtccgctgtttacgttaacgcctctacgcgttttaccgacggcggccagtttggtctgggtgcggaagtggcggtaagcacacaaaaactccacgcgcgtggcccaatggggctggaagcactgaccacttacaagtggatcggcattggtgattacaccattcgtgcgtaaataaaaccgggtgatgcaaaagtagccatttgattcacaaggccattgacgcatcgcccggttagttttaaccttgtccaccgtgattcacgttcgtgaacatgtcctttcagggccgatatagctcagttggtagagcagcgcattcgtaatgcgaaggtcgtaggttcgactcctattatcggcaccatttaaatcaataagttacacatcactagtaccttccttattttttgactgggacaaatttgggaccgatgggttcaggatcgagtctatttgccgtgcatgttcggtaaggtgattaggtgcgaggtgagcatatcgacgaaccatttcgatagactcccagcctcccatttcctgtaacactgacaacgggactccggcttgaaccagccaacttgcccaggtgtgtctcaagtcgtgaaatctgaaatcatcaatacctgctcgtctcagcgccgctttccaggctgtgtttgcgtcataccgcatcttcctgaccgttggcgctttcgttccgtctggtttggtacagctttccttgtacacaaatacccaacggtgatgattcccgatttgttttttcaatacgcgacatgcagtatcattcagcgcaacgccaattgcgcggtttgatttactctcttccgggtttatccatgccacccggcgctgcatatctatttgttgccattcaaggttgatgatgttcgagcgtcttaagcctgttgccagtgcaaattcaacaacagactttaatggctccggacattcatcaatcagcctttgtgcttcatggggctccagccagcggatccgtttattctttggttgaggcactttaataattggtgccttatccagcattttccattcacgctctgcggctcttagtagggcctttataaatgaaagatgcgtagccttcgttgcaacggacgctggttttggcgtgtattctggaacaggtttccctttttttctgcatgcttctgccctgagtttccagttttcctcatgacgccggttcgtcattttctgcattgctgaataaatttttgattcagtaatgtctcttagttgcattcctgcgaaatgttgaagccagaatccgatccggcttttgtcatcgtccagtgattttttatgtgctttctcttcaagccacctgacacacgcttcctcgaacgttatatcaggtatttcaccaagtttgctgacccgccatgcttcagcctttagcttgtcatggagttctgtcgcctgccttttgtcctttgttccaagagactgtttaaatcttttaccgttcggcaatgtgaaactggcgtaccatatttcacctctgcggaagagtgacattttctttcctctgttatgccatcacccgcgctcacctggacagtatgcagcggagactgaagagccgcaatgcaggcttgtcgtgttgtgaggtaaggagatttattcttagtgggatctttgcgtgttgcctgaagacgccctgtgcgtatccagttaatggcagtcggtctggatatcttgagaaaatgacaggcctcatcgagtgtgaggctgtatggctccattatttcacctcttgctgtgacattgttgaaaaatggataccagctcgttgctgccagacgatccaaccgagagtcatatcccatgccatgtattcgttatcgccgttttttgctctccgacgatctactaagtcaccgaaacgcttttccatgaataattcataagcttcgcgttcatctggttctacttccagcgataggagtgcgatttcataagcacggcgctcaatatcgtctcgcacgtcaaggctgctgatacgctctttaatttctttaatcagttctttgtcggtaaaagtgatcattatgctccagcctccggtgcttttggcattattgcccagtgagtgatattgacgttttcaaggtccccgacctgaaatgtccactgccattctccggtttctttttgtccccaggtgtaccagagagaacgccagccaattagccagccttctccgttagcatcgaataacaaaacactttcatttgctggtggcagttcagctgacactggtattactttgttttcctgtgctgcacatttagcttcaagcgcatcgaatttacgcaccaggtattcagcatctgtttcatttactttcagatctcgcggtacacatctcccacgaagaaacccttccatttcgaaaacattcatgcgcatttgcgtaactccgataactcgttaaaacgttccataaacatcccgtaggcatggcccggtgcctgtggaatcactttgaacatctctgttgccgggataccttccagtacaggccagaaagagccatcatcaagcccgagatcgcggcgttcggttgccagcataatgagatcggcatatttcactggcgtgctcataacaggaggtaacccgtatttctcacgtattacggcgtctattttttcttccatccgtttatagtcaggaagaagtcgtttcagtggtgcggggatgtcctggcaatatgcttctgttgcatcatgcattaaagcttcaaaagcaaattcctgtggcaccagctggctgcaaagcaccgcatgttgggcgacactgtagaagtgtgaaagatgtcctgcaaagcgacagatatttgaaagggaaaccgcgatatcgttaataacgatgtcgtctttatttatcctgtcataataaaaatgcttcccggaaaaagttttaataaatgacattttgttctccacgtatatgcgctgcaccgcgctgaattcgggtaaaaggaagccctcaccgtccggcgattattgagtcaattacatttccataaatgcccccgtaggggcggttagtttctccacaaaacagagaagaacacctgcggtggcagccgcccggatggattgggttatgagcccgtcgtccggtgatgctcttctctgttttgtaaaaaggacggtaccagccggaagcaagggtacaagctggtaccgccaagactacacacagcataaagttgtggtgccgggtgcctcccggtgcctggcgaaggttgcacaccaggcgggtgggtatccacagaaggtcgactgtcagcctcaaccttaacccgcgtgcgctgagccgcattcaccacaacgctaaggattctctctggttgaaaatacttagctgttatgtgcctgtcttttcaccacttcaggctcggtggtatccttttaagcccgtatacataaaaggaaaatcaaatgacttttgatgaaaaagaacttgataatgcaattaataaaatcatcgtaacgtcgctcttttcctgtctcagcgacactcagcaaaaacagttctacgaatcggctttcaacatgatcgagcgttgttgtttctgcgatgccgacgagttacctgaaaaaatcaggaaacagttggctgatgctcttcgagtgcgactttctgaccaattttctgaaatgtactctccgaatttggacaaatagaaaaaggccatttccattcagggtctgatggaaatacttcagcctgttccaaagcacggcgtaaagagaacacaactccagccataatctgatgtttcccattggtccagctatcgccgctctgatctacaggggcggctatgtcgtatgaccaaacgacttcacagttattgtttaaaatctggactttcatttcatacacctgctttaacatgagtgcctggtggcacaacatgactcaacgaatcatcctggacttcatatgccccaggcggctacttcgtgggcgtcctgcctgttcgtttttgacatttactgactgcttacgacacatgcaccgtgttgcaaccagattttgttgtaatcctgtagttggtctggaacaaaagataaaattaaattgcgagatatgcaagtgatgtttgcgaaatgtgcaaatttataggtaataaaaagccacctttcggtggccgatggatgggatattgaggttaattatgtctcttaagggtttgcgactgactgattaagacctttccaaagaccatgaatcggtgttcgttttcgctagtaattccccattcacggtaaatctggttatcagaaatcaccagcagtttgtcaggaatcatttgaagtcttttaacgtatattttgtcatcaaaaccaaagacatatataccatcaccatcaaactgattgatgctgacatcaacgaagatgagatctcctggctcaatggttggacacatactgtccccacgaacgttgataactttgatgtgattggctggtcgtccgccgaacattgatacagcattatcagttctgtattcgatggcatgaatcacatcaatgacatcaccgccctggataaggccatttcccgcactggcactgatatccagcatttcaatacggaacacatccttcacctgcgcaacatcctcattattactgtttttatatacagtattacttttgtgggcagaggtaaagagatcagcaatatcaacacctaagctcttggcaatattactcagtgtttgttcggtaaattgtttttgcttacccgtttctaagcgcgagatgttcgccgcatctactcctattgcttcagcgagatcggcgattttcatgttcttcgcttggcgaagttgtctgactcggtttcctatgttcatgcgtttattacatttctttattgcgtgataagcaaatcaacttgcgcaaaataattgcgtgaaataacatgcataacgcgcaatatttggagggcatatgcaatcaccattacgaaatgtgcgtaaggcgcatggtttcactttgcagcatgttgctgcgggtgttcaagtcaatccagcgacgttgagtcgtattgagaggctggagcagattccatctatcgagcttgcagaacgtttagccaatttttttaagggtgaagtcagcgaaatgcagattctttatccggcacgttttcaatctagccaaaaccagaatgggtttaaaccacaggaacaggaggtgaaccgtgggtaagcatcactggaaagtagaaaaacagcctgagtggtacgtgaaagctgtcagaaaaactatcgcagcgttgccgggggggtacgctgaagctgctgactggctggatgtaacagagaacgcattatttaaccgccttcgtgccgatggcgatcagattttcccgctgggatgggcaatgattttgcaacgtgctggtggaactcacttcattgctgacgctgtggcgcagtctgcaaatggcgtctttgtgtctcttcctgacgtcgaggatgtggacaacgccgatattaaccagcgcctgctggaagtcattgaacagatcggcagttattcaaaacagattcgttcagcaattgaagacggtgtagtggaaccgcatgagaagacagcaattaacgacgagctgtacctctcaatttcgaagctgcaggagcatgcagcactggtctacaaaattttttgcatttcagaaagtaatgacgcccgcgagtgtgcagctccgggcgccgtggcgtgtcgtgactgtggagaaactaacgcatgaacagtttaacaacacactaccgtcgctcgcaactgattgcgcttcctgtaccgggtggaaaagcgaaggtggagtattgctatgcagtaaatgtaccaggtgacagggaaattgtaacccacagctttgcagagtgggctgtgggtgatttcaaccggcagaaggagacagccctttgcgacaagttaaccgctggttcaaagatcactacggagtgcccgtcagagtcattcgttgggagccggaaacacaacgggttatctacctccgcgaaggctatgagcatgagtgcttcagcccgctcgaacagtttcgtcgtaaattcagggaaatagaggtcggtcatgagcactaaattaaccggctatgtatgggatggttgcgctgcatcaggcatgaaattatccagcgtggcaattatggcccgcctggctgatttcagtaatgacgaaggtgtgtgctggccatcaattgaaaccattgcccgccagattggcgcggggatgagtaccgtcagaacggctatcgcacggctggaagcagaaggctggttaacgcgtaaggcgcgtcgccagggtaaccgcaatgcgtcgaatgtttatcagcttaacgttgcgaagcttcaggcagcggcattttctcaactgtcagattctgacccgtcaaaatctgacgcatcaaaatctgacccgtcaaaatttgatgcgtcgaaatctggcaaaaaagcgggttttcacccgtcagaatctggcggggatccgtcagtaaaatcaaaacatgatccgtcagataaaaaaacttctcgtccggacgcttcgcaaccggacacgcagacggatgaacaggattttttaactcgccatcctgatgcggttgtattcagccctaaaaagcgccagtggggaacgcaggatgatttgacctgcgcacagtggctctggaaaaaaatcatcgccctgtacgagcaggccgccgaatgtgacggcgaggtggttcgtcccaaagaaccgaactggacagcctgggcaaacgaaattcgcctgatgtgtgtgcaggatggtcgtactcacaaacaaatctgcgagatgtacagccgcgtcagccgcgatccgttctggtgccgtaacgtgctcagcccgtcgaagctgcgggaaaaatgggatgagctttccctgcgcttatcgccgtccgtaagcacgtacaccgaaaaacgcgaagacccgtacttcaaatccagttacgacaacgtggactacagccagatcccggcaggattcagggggtgatcatgagtctgttaaatgacgttcagaaattcattgaagcccatccggggtgtacttccggagacattgcggatgcttttgctggttactcacggcagcgcgttctgcagtcagcaagcaagttacgtcagagtgggcgtgtggctcaccgttgtgaaggggatacacgcagacatttcccgcgcctgactgagagagcgcaggagccggaaccacaaccagttcgtgaaaccagacctgcgcgcaatttctatgtcggcactaacgatccccgggtgattttgtgcctgacccgccaggcggaagaactggagtcaaggggcttataccgtcgtgctgcaaccgtgtggatggcggcattccgtgaaagccactcccagccagaacgaaacaattttctggcgcgtcgtgagcggtgcttacggaaaagcagcaagcgcgctgcatcgggtgaagagtggtatctgtcagggaattacgtgggggcttaatgagtaataaatattgccaggcgctggtggaactgcggaataaaccagcccatgaactgaaggaagtgggagatcagtggcgcacgccggataacattttctggggaattaacaccctgtttggtccgtttgttctggatctgttcactgacggtgataacgccaaatgtgccgcgtattacacggcggaagacaacgcgctggcgcatgactggtcagaacgtcttgcggagcttaaaggtgctgcctttggtaatcccccatacagccgcgccagtcagcatgaggggcaatacatcaccggcatgcgttacatcatgaagcatgccagtgccatgcgtgataaaggcgggcgctatgttttcctgatcaaagctgccaccagcgaagtgtggtggccggaagatgcagaccatattgcttttattcgcgggcgtattggttttgaactgcctgtctggtttatcccgaaagacgagaagcaggtgccgacaggagcgttcttcgctggtgctattgctgttttcgataagacctggaagggaccggcaatcagctacatcgggcgcgatgaacttgagacatgtggtgaggcgtttctggcgcaggttcgccagcaggcggaaaaactggtcagggagatggcggcatgacgacattaactcaatgccagcagcaggtgctggatatgctgatttcttatcagaaagaacgtggcttcccgccaaccaatcaggaggtggctaccatgctgggataccgttcagtgaatgcagcggtggagcatcttcgcgcactggagaaaaaaggcgtcatcacgataaagcgtggcgtggcacgggggataacgcttcataccgcggtgaaggacgacgacagcgaggcggtcgggattatccgctcactgcttgccggtgaggaaaacgccaggctgcgtgcagcccactggttacatgagaggggcctgaaagtatgaagctgatcctgccttttccgcccagcgtgaacacgtactggcgacaccccaacaaaggggcgtttgctggtaagagcctgataagcgcggcggggcgcaaattccagagcgcggcgtgtgcagcaatagttgagcagttacgtcgtctgccaaaaccaacgtcggcacctgcttcagtggagatcgtgttgtttcctccggataacaggatccgcgatctggacaactataacaaggcgctgtttgacgccctgacccacgcgggggtgtgggaagacgacagacaggtgaaaagaatgctggtggagtggggaccggttatcccgaaagggaaggtcgagatcactatcactaagtacgaaaaagcgagttgcaaattagcaactcggtaacggaattgagcaacaccctaaatttgggtattacctcgttaaagatactgtatttatgaacagtgtatccttgataactattaaaaatcgcagtaagttcatcctgcatcaacgaaaagggagtgcagtcccgctcgtggataaaaatttgtggagaaaccaatgaatcagttgcttgtaattgatggcgtttctgtgcgccagtacttcgaatctaactactgtcttaacgaccttcagaaagctgctcttcttgccgctggtgagaatcgctcctcccgttcgctggaagttcacgaatttatgcgtcgtcctgaaacgaaggctcttgtggaattattggaagaagaaactacgggagattcccgtagtattcctgtcatcaccattcaggggcgcaatggtgggacgtatgtctgtaaagagctggtctatgcatatgcaatgtggatcagcccggcattcagcttaaaagtgatacgtacttttgatgcgcttcataattcatcaccagaagaaaccacatccgacaaaattaaatccggggtcattctgcttgaatcagcagcaaagactctaaatctgtcaaactcctcgaaacttggtgcataccagaaattatcaaaggtagctggtcttcctgaacttatgccgatctatgccattgatgcacctgctgatgcgccagatggttcaagccgccctacgctgtcgctgagtgcactgctgaagcagtatggtatccgcctgacggctaatcaggcatatcaccagatggcgaagctggggatcgttgaacaacgcgaacgatacagccgtaccgcaattaacaacattaaaaaattctggtcgctgacggcgaaaggctgcatgttcggcaagaatatcaccagtcccgcaaatccgcgtgagacgcagccgcatttcttcgaatcccgattccctgagctgttaaagctgctcgataccgttcattgaggtgaccgtgagagcactactgacccctgaaattgccccgcgtatggggatcgtattgttcagaccaggttcagagctgatgcccttgtttatgcaggggcgtgtcttgctggagcctgagccggaacgttattcatctttcgccagtggtgccgttccggcggcatcacaaccgctggcggatgatcctgccgttcgggccgtgttccgcaatgaggcagtgatccgtcgtgctggtggcgtggaatgtcttgaaagctggttacttcgtgaaaaaggctgccagtggcctcattccgactggcacagcgagaacatgacaacaatgcgacacgctccgggcgcaatccgtttgtgctggcactgcgataaccagctgcgcgatcagttcacggaacggctggaatcaatggcaacggataacagtgcccgctgggtgttgtctgttgtgcgtcgggatctcggttttgatgacagtcatgttgtgacaatgccggaactgtgctggtggctgattcgtaatgatctggcggatgccttaccggaaagtgcagcccgtaaggcactgagattaccgaagcctgttgtgccgtctgttacccgggaaagtgaccttgtgccttcggttcctgccaccagcatcatccaggataaggcgaaaaaggtgctggcgctgaaagtggatccggagtcgccggagtcttttatgttacgccccaaacgtcgccgctgggttaatgaaaagtacacgcgctgggttaagacacagccgtgtgcatgttgtggaaagcctgctgatgatccccaccacctgataggtcacggtcagggtggaatgggtacaaaagcgcatgacctctttgtgttgcctttgtgcagaaagcatcacgacgagctgcatgcggataccgtggcatttgaagagaagtatggctcccagctggagctgatatttcgttttatcgatcgtgcgctggcaataggcgtactggcgtaagtggagaatgctaaatgattaatccttctgaagttggcaaatcaggtgaaatggttcgccttcgtactctggaaagtatctggatacaaggcaagttgcgcatgtggggccgctggtcttatatcggcggtggtagtggtggaaacatgtttaaccagcttctggcatccgggaaaatcaccaagacagctatcaatgaagcgctacgccggatgaagatagcgggtatcaccaagcctgaacttgaagcgtacctgcgtgaaattctcaacagcaaaaataaaagcggcctggcgttctgttcagatgaagaagggttgttagtggacggtgtcattgcttcagtactgatgaatgatgactaccgatcgctctatagcgtgattgttgaccggtatcgtcttcgtaagagcaagttgcagatggccaatgaactgcaggctaaacatcctgactggccgctgatcacctgtcgtcgacgcattgacacttggctaagtcttgcagaatcgatcctgtacgctccagtttgtgacgcattcggcacaaatagcgacagatttaagttgcagagtgagcaagaaagtgcttaaattgtggtaggctcgggacgttaaagcgaactgagcaacacaacattaagagcccgccattgagcgggtttttttgttatgattcctctgaaactcaggaggcttcatgacttggcaaaacgtaccgtacgctttcgaaaaaactactggcgagttgaccttggtaatagaaaaattaccgccaattgaaatcagttcttcctttccttttgaaacactcattactgctcttgcaggcgttattgccgcaggaataactggttgggttgcatacagggcaatcaaagaaaattttgccttagccacattacaggctcacttgaatactaataaagaattggcgcaacaaatacgttttgctggcgctgagcatgtgacagacgtaattatgttggccagcacatttgagcaatggcatctggtcggaaataagaatatggatatattggctaagggtgttttccctgaggagattcaagttccaataaaggccgctgaaataagtaaaaataaattacttctattaataaggcctgatgaggaaggttgtaagttgataaccctgacggcagatcttcaaaaagcgctaaaagtatgttttacaaaagggtattttactccggaagaaaaaaagtcatttattgatgcacaaaacgcctttatttttgggtgtcatgagtatatcaatcaaagtttatcttaaaaaaactataccttaccaaggccgccttaatgcggccttttttgtttcccctcgttctgagaggaccaacagcaattaagagggggctaaatgtccgatccgatttccggtactgggctagctggtggtgccctgacgggtgccagtgtttatggactgctgaccggaactgattacggcgttgtatttggcgcatttgcaggggctgtattctacatagcaacagctgcagatctgagtgcatcgcgccgactggcatattttatcgtgtcatatattgccgggattctttgctctgggttggttggctccaagctggcgaacttgaccggatacagtgataaacctctggatgctattggtgccgtaatcgtctctgctttagccgttaaaatcctgacgttcctgaataatcaggatatcggctcgctggtggcgctcataacgcgccggggaggttcaggtggagctaaatgacccgacagcaactataaatgcgctgttatgtgcttgtgttgttattactctgatgttttatcgtcgtggtgattcgcggcatcgtccttgggtttcacgtttagcctggctgattactgttacatacagtgctgttccgttggcctatctctgtgggatttatccccattcctcatggcccattatcgtggcgaacactatttttctttccgtgctggtggctgtcagaggcaacgttgcacgtctggttgatcatctgaggcactaatgaaccaacaattatttcaaaaggcggctggtattagcgccgggctggctgcgcgctggtttccgcacattgatgcggcgatgaaggaattcggcattacagcaccagcggatcaggcaatgtttatcgctcaggtaggccatgagtcgatggggtttagcgccgtagttgaaaatcttaactacacaccatctgcgcttgtggcgacgttcggaaagaggatcacacagcagcaggctgatgcccttggcagaacatccggacatgcagctcgtcaggatgctattgccaatctggtgtatagcaaccgactgggtaacaaagcaccaggtgatggctggaaatatcgtggtagaggattaattcaaatcactggcctccataattatcgcatctgtggcgcggcgctgaagttagatctggtgacttcacctgaacaactggaacaggaactacaggctgcgcgctcagctgcatggttctacacctctaaaggttgcatgatctacggtgccgatattaaccgtgttacgcgcatcattaacggcggtttgaacggtattgaggatcgtaaggtccgatacaacaaggcgcgggcggcgctgctggtatgaagatgagttattgggcgctcattttaacgtttattgcttgtgtcgctggtggtcttgtctggtcagcgaatcactatcatggaaagtttctggaggagcagaagcgtgctgatgctgcggaacagcgagctgattctactgaggctatcaccgcgaatgttctgcgtactatggcaataacgaacatcattcaggaggcgaatcaacatgcaaaacagcagatcgcactggagtcacagagaacccaggaagatatcaaagtggctgttgcggatgatgattgtgcttcacgtcctgtgcctgctgccgctgctgaccggttgcggaagtacgcggacggtttacgtgagcgctccggtggcaccactgccagccagcctgacttctgatactcctgtaccgtttatacctactccgctgacgtatggtgccagtctggagttgaatgtgagtctgttgtctgcactggctaactgcaatcgggataaagtcgatattcgaaaagtagatgcagagagaactaaccattaagcaataaaattgacagtttaatcagctgtcaaatgaatatacgttaaaggtatatgtcgacataatttcaccaaatacctcaatacatacgctttttttatgaaaattactggggaatgaacttgcctcttcaagacattgaacataagtgctgatatcacttgcatcacgttcaaggaatttcacttgaccaaaagaaggggttttaatcctggttctttgctggattatatggataaagtgtgtagttggtgaaactattactcttgaaatatcggaaatgatgtcttcttgaacttgccgataaagtaaatcctttgggtaatgatgctttatctcgatggacgcaacattaccattatgttcaggcgttaatatcgacgggttataaagtgatatgtcaacagcgccgataccgagttttggatgctcacttaaagcagttagtgtgctgatttgattgagtataacaactaactcatcacgtatttgtgtttcatgtttgcgattgtagaagtagcaattcagttcatttaattttttatgcattctatcgtgactaattgcttcgatcagtaaatcctgaatcatacttttctctgggtagtcccacaatggttgtacgtgagagtattgtgctggcatatcataaacttgtaaagatattgttagcatcagcatgataacgaagtttcatcgatagaaaaactttacggcccactcgtaaaccgctttgtaaatcggttcatggtaaatactatcgatactattcagatgtgcgatcatcgcctccacagttgtagtggttgtttctaatatttcgattattgcagggcggtcatcatcttcatcgaagtattcgaacagcagtacaggtttaccatgccattcagcatctgagactctaaggttacaactaccgctcaactcaaagtgaattttgtaattaccttctacagaatggcctacggggaaaaagcatagggtgtcatctttgtttaaaagccattcccattcataactgttcatttgtgaactcctgttcattgagtttcaacaactatcaactacatccagcgaagcataaaagatcgtttatggcaaaaccggagtggagtgcgattcgattctgagaaggatgccacgtatcgcacgcgaaccatccaagaggattatgcaatgccaccacgaaccccaaaagcctgccgtgttcgcggctgccgctctacaaccacagacccgtcaggctactgcgaaagccacaaaagcgaaggctggaagcagtacaaacctggacagtcccgacaccagcgcggttatggttcgaagtgggacgttatccgcgcgcgtgtgctgaagcgtgacaaaggcctgtgccagttgtgcctgcgtgccggtgtggtgcgtgaggcgaaaaccgttgaccacattatccctaaagcgcatggcggcactgatgctgactgcaatctgcagagtttgtgctggccgtgtcataaggcgaagacggcccgtgaacggcttaggtgataataattatcaactgtatgagggtaggggcgggtccaatccctgtgacctgacgtcttccggactgcccgccccatcgtttttttatacccgcgaaaaatgaaatttaaccaggagtgccgcatatggctggaacggcggggcgttccgggcgtcgccccaagccaacggcgcgcaaggcgctggccggaaaccccggcaagcgagccctgaataaagatgaacctgtttttacgcccatcaaaggtgttgagccaccggagtggttcgctgaagaagatctccctctcgccacgatcatgtggcaactgacaaccaaagaactctgcggtcagggcctgctgtgcgtgactgacctcgcggtgcttgagcggtggtgcgtggcctacgagttctggcggcgtgccgtgaaaaatattgccagacagggcaacaccatcaccggtgcaatgggtggcatggtcaaaaatccggagctgaccgccaagaaagaacaggagtccgagatgagcagcacgggggcaatgctcggactcgaccccagcagccgccagcgtctgattggcctggcggggcagaagaaagccactaacccgtttctgaaaatcatcgaatcatgagccggaaatcttaccccaacgtaaatgctgccaatcagtatgcccgtgatgtcgtgcgcggaaagattgtggcctgccagtttgtgattcaggcctgccagcgccatcttgatgacctgatggcggaaaaaagtaagtcgtttcgttaccgcttcgacaaggacctggctgaacgggccgcgaaatttattcagctgttgccacacaccaagggggagtgggcattcaagaggatgcccatcacgctggaaccgtggcagctctttgtgatctgctgtgcgtttggctgggtcaataaaggctcccggctgcgccgcttcagggaggtgtataccgaaatcccccgtaagaacggcaaatcggcaatctctgccggtgttgccctgtattgttttgcctgtgataacgagtttggcgcggaagtgtattccggtgccacgacagagaaacaggcgtgggaagtctttcgcccggcgcgactgatgtgtaaacgcacacccatgctgacggaagcgttcgggattgaggttaacgcctcaaacatgaaccgtccggaggatggcgcgcggtttgaaccgctgatcggtaaccccggtgatggctcatcaccccactgtgccgtggtggatgaatatcacgagcacgccaccgatgcgctttataccacgatgcttaccgggatgggcgcgcgacgtcagccactgatgtgggccatcaccaccgccgggtacaacattgaggggccgtgctacgacaagcggcgggaagttatcgagatgctcaacggttcggtacccaacgatgaactgttcgggatcatctataccgttgacgaaggcgatgactggaccgacccgcaggtgctggaaaaagccaatccaaatattggcgtgtcggtttatcgcgaatttttgttaagtcagcagcagcgtgcgaaaaataacgcccgtctggcaaacgtctttaaaacaaaacacctcaatatctgggtgtcggcgcgttcggcgtatttcaacctggtgagctggcagagctgcgaggataaatcactgacccttgagcagttcgaggggcagccgtgcattctggcctttgacctggcgcgtaagctggatatgaacagcatggcgcgactttatacccgcgagattgacggtaaaacgcattactacagtgtggctccgcgcttctgggtaccgtatgacacggtgtacagcgtcgagaaaaatgaagatcgccggacagccgaacgctttcagaaatgggtggaaatgggcgttctgaccgttaccgatggtgcggaggtggattatcgctacatcctcgaggaggccaaagcggcgaacaaaatcagcccggtcagtgagtcacccatcgaccccttcggggcgaccgggttgtcacatgaccttgctgatgaagacctgaatcccgtcactatcattcagaactacaccaacatgtccgacccgatgaaagagctggaagcggcaattgaatcggggcgctttcatcatgatggcaatcccatcatgacctggtgtatcggcaatgtggtcggcaaaaccattccgggtaacgatgatgtggtgaaacccgtcaaagagcaggcggaaaacaaaattgacggtgcagttgcgctgattatggcggttggcagagccatgctgtacgagaaagaagacacgctgtctgaccacattgagtcctatgggatccgctcgctttaactgaggtaattatgatcatgctgattctcgcgcctctggtgggcgtgctgggggcgcttttgctggcgtatggtgcctggctgatttatcccccggcggggtttgttgttgccggggcgttgtgcctgttctggtcgtggctggtagcgcgatatctcgatcgtacacagctgtctgttggtggaggtaaatagtgttcttttcgggattatttcaacgaaaaagtgacgcaccggtgaccacgccagcagagctggcggatgccatcgggttgtcctacgacacctataccggaaagcagatcagcagtcagcgggccatgcgactgacggcggttttttcctgcgtcagagtgctggcagagtcggttgggatgttgccctgcaatctgtatcacctgaacggcagcctgaagcagagagccaccggcgaacgtctgcataaactgatctccacgcatcccaatggctatatgacgccgcaggagttctgggagctggtggtcacctgtctgtgcctgcggggaaacttttacgcctacaaagtgaaagcatttggcgaagtggctgaactgctgcccgtcgatcccggctgtgtggtaccgaagcttaacagtagctgggagccgatctatcaggtcacattcccggatggatccacggatgtactgagccaggaggatatctggcatgtgcgcacgctgacgctggacggactggtggggctgaatcccatcgcctatgcccgcgaggcaatatcgctggcggcagcgaccgaagagcacggggccagactgttcagcaatggcgcggtgacgtcgggtgtgttgcgtacagagcagacgctgtcagatcaggcttatgagcgcctgaagaaagattttgaggagcgtcacaccgggcttggcaatgctcaccgcccgatgatccttgagatggggctggactggaagtcgatggcgctgaacgccgaggacagccagttcctggaaacccgcaagtttcagcttgaagaaatctgtcgtctgttccgggtgccgttgcacatggtgcagaacaccgatcgcgccaccttcaacaatatcgaagagctggggctgggatttatcaactattcactggtgccgtatctgacccgcatcgaacagcggatcaacaccggactggtacgaaaaagtaagcagggcgtttattacgccaaatttaacgccggggcgttactgcgcggggatatgaagtcccgttttgaagcctacgccaccgggatcaactggggaatttactctcccaatgactgccgcgacctggaagatatgaatccgcgtcccggtggtgatgtctatctcacaccgatgaacatgaccacgaaaccctccgatggcagtaaagccggtaagcagaaggataacgccaatgcagacgaaacaacgtcttgatgtaccgctgagtctgaaatctgtcagtgactccggtgagtttgaagggtatggctccgtctttggtgtaaaggacagccacgatgatgtggtgatgtccggggcatttgctgcttccctgcgggcgtggagtgacagaaaagcgttacctgcgctgctctggcagcaccgcatggatgaacccatcggtgtttacaccgaaatgaaggaagacgatgtcgggctttacgtcaggggacggttgcttattgatgatgatcccctcgcaaaacgcgcacatgcacacatgaaggccggttcgttaaccggcctttctattgggtacgtcctgaaagactgggaatacgaccggagcaaagaagcctttctgctgaaagaaatcgacctctgggaagtcagcctggtgacgttcccgtctaacgacgaggcgcggatcagcgacgtcaagaacgcactggcccgcggggaaatccccgaacagaaaaaaatcgaaagagtcctgcgtgatgtcggactctcccgtacccaggccaaagcattcatggccgggggctatggcgcactgtccctgcgcgacgctgaggatgtgggctctgcactgaatgcactgaaaaatctgaacttctaatcaggagaaatacgatggcggttgatattaaagatgtcgaacaggtcgcgcaggagctgcagcagaagtttgacgacttcaaagcaaagaacgacaagcgcgtggatgcgattgagcaggaaaaaggcaagcttgccgggcaggtggaaaccctgaacgggaaactcagcgagctggaaaatctcaaaagcgaccttgaaaaagagctgcttgagctgaaacgtccggctggtggagcgcaaaataaactggccaccgagcataaagaggcgtttgtgggcttcctgcgtaaaggccgtgaagacggtctgcgcgatctggagcgtaaggcattgcaggtgggtaccgatgaagacggtggctacgccgtgccggaagaactggatcgcaacattcttaacctgctgaaagatgaagtggtgatgcgtcaggaagccacggtgatcaccgttggcggttccgactacaaaaaactggtgaatctgggcggtacggcttccggatgggtgggggaaacggatacgcgatcccagactgccacctccagactggagctgattgaacctctcatgggggaaatttacggcaacccgcaggctacccagaaaatgctggacgatgccttcttcaacgtggaggcctggatcaacagcgagctggcaaccgaatttgccgaacaggaagaaattgcctttacctcaggcgatggcaccaagaagccgaaagggttcctggcgtatgaatccactgatgaaaccgacaaggtccgggcgttcggcaaacttcagcatattgtatccggcgaagcgaccgcggtgaccgcagacgccattatcaaactgatttacacgctgcgtaaggcacaccgcactggcgcgaagttcatgatgaacaacaacagcctgtttgccatccgtctgctgaaagacaccgagggtaactatctgtggcgtcctgggctggaactggggcagccatcctctctggcgggttacggtatcgctgaaaacgagcagatgccggatattgccgcggatgcgaaagccattgcatttggtaacttcaaacggggttacaccatcgttgaccgtatcggtacccgcattcttcgcgatccgtacaccaataaaccgtttgtcggtttttataccaccaagcgcaccggcggcatgctggtcgattcgcaggccatcaaactgctgaagattgctgcggcgtaatcactcaggggcgcggaaccgcgccccctgttctgacgggtgaagaatcatgatcctgaaacaagatctgaaatggtcaccggacggtatgcgtgttgaggtcattcgggccggtgagtatgacgacggggcgcttcctgcccgggtgcaggagattgcacttcaggccgggttagcagagcgcggaaccagtgcaaaaagcagtaaagcgacaaaagagaataaagccacgaccagtaaagagggctgagtatgcttctgacaatggaagagattaaagcccaactccggctggatgaggatttcgatgctgatgaccgccatctgcaactgctggcctgtgcggcgcaaaagcggacggaaacgtatctgaaccggaagctctatgctccggatgaaaccattccggacagcgatccggacgggctgcacctgccggatgatattcgtctggggatgctgatgcttatcagccatttttacgaaaatcgctcgtcggttacagacgttgagaaaatggagttgccaatgagctttaactggcttgtcggcccgtacaggtatttcccgcaatgaaaattcgtcaggcgcagaccagcgcaacctacattctgccggaccccggtgaactgaataaacgcgtcctgatccgccagcgggtggatatgcccgcggataactttggcgtggagcctcaatacccggttgcgttccggacatgggcgaaggttgtccagaccagtgccaccacctggcaggaaaccgcgcagaccggggacgccatcacccattacatcaccattcgttaccgccgggggatcaccgctgattatgaggtggtctgcggtgacagtgtgtaccgggtgaaacgtcagcgcgatctgaacggggcgcggcgctttctgctgctggagtgtacggagctgggcgaatgtaggcagagtcacggaggcaacaatgacgacttcctttttgcacgttgattttcagcagcccgcggagatgcgctttaaccgcgcccgtgtccggcgggcgtttgtcacgattggtcagcgtcatatgcgtgatgcccgtcggctggtgatgcgccgtgcgcggtcggcaccgggtgaaaaccccggttatcagaccggacgcctggctcgttcgattggttacatggtacccagagccagtaaacatcgccctggttttatggcacgtatagcccctaaccagcgtaatggagagggaaaccgccgtatcaccggtgatttttatccggcttttttgttctatggcgtgaggcgaggggcaaagcgtcgtcgcagccatcatcgtggtgcatccggtggcagcggctggcgactggctccacgtaataacttcatggtggaaactcttgaaaagaaccgcagctggacacgctattttctggcgcgggaattgcgtaaatcactgaagccggagcgacgacacagatgaaactgacgcctgttattgctgcgctgcgtgcccgctgcccgtattttgaaaaccgggtggcaggcgcggcacagttcaaaaatctgccggaggtcggaaagctgagactcccggcggcgtatgtggtaccgggggatgattctccgggagaaaacaaaagccagaccgactactggcaggagctgaaagagggcttctccgtggttgtcatactgagtaacgggcgtgatgagcgcggtcagtttgcttcgtatgatgtggtggacgatgtccggcagatgctctttaaggccctgctgggctggaacccggaagagtgcggtaacccgattaactatgacggcggcacgctgctggatctgaatcgtcatgagctgatttatcagttcgatttttcgatcatcagcgagctgactgaagacgatacccgccagcaggatgacctgaacagtctggatgaactgcgaacgctggcgattgatgttgattatctcgatcccggtaacgggcctgacggcgatatcgaacatcacaccgaaataacccttccttcctgagaatcttcatgtttgtgaaacctgttaaagggcggtcagtgcctgaccctgcccgcggtgaccttttgcccgccgaagggcgaaaggttgacgagaacaactactggctgcgccgtgaagcagcgggtgatatccggcgcgtgaataaaaaggtgaacaccgatgacgataagctttaacaccattccgtcgaatacgctggttccgctgttttatgcggaaatggataaccaggcggcgaatactgcacaggacagcggagcatcgctgctgattggtcatgccaataacggtgcagagattgttgccaacagtctgttgctgatgccgtcggcagactatgcacgccagatttgtggtgcgggaagtcagctggcgcgtatggtcgaggcttatcgccagaccgacccgtttggtgaactgtatgtaattgccgttcctgaatccacgggcgcggcggcaacagttacgctgacggtgaccggggcggcaaccgaaaccggcacggtgaatgtttatgtgggacgtacccgcgtgcaggcaccggtgactaacggcgataacgtcacgacgattgccagcagtatccaggatgccatcaatgccgttccggccctgccgtttacggcctcatcttcggctggcgtggtcacactgaccgcgcgtcataaggggctttgcgggaatgaaattcctgtcagcctcaattactacggctttggtgggggcgaagtgctgcctgcgggcgtacagattgccgtggcgacggggaccgccggaacgggctctcctgttctcaccggcgcggtggctgcaatggcggatgagccgtttgattatatcggcctgccgttcaacgacacggcctccgttaacacactggtgaccgagatgaacgataccagcggtcgctggagctatgcgcgtcagctgtatggtcatgtgtatacggcaaagatcggcacgctgtcagaactggtgaccgcaggtgaccagtttaaccagcagcacattaccctggcggggtacgaaaaagagacccagacgcctgccgacgagctggcggcaagccgtaccgcccgcgcagcggtgtttatccgcaacgatccggcacgtcccacgcagaccggtgagctggtgggtatgctgcctgcgccgaaggggaaacggttcacgatgaccgagcagcagaccctgctgtctcatggcgtggcaacggcgtatgtcgaaagcggggtgctgcgcattcagcgtgatgtcaccacgtacaggaaaaacgcttacggggttgcggataacagctacctcgacagcgagacgctgcataccagtgcgtatgtactgcgcaaactgaaatccgtcattaccagtaagtacgggcgtcacaagcttgccagcgacggtacccgctttggtcccggtcaggcgattgtcaccccggcggtaatcaaaggggaactgctggcaacctaccgtcagcttgagcgtgcggggatcgtggaaaactacgaactgtttaagcagtacctggttgtggagcgtgatgccagcgatccgaaccgcctgaacacgctgttcccgcctgactatgttaaccagttgcgtgtttttgccgtggttaaccagttccgtcttcagtattcagaggagtctgcataatggcccgtatcgggggaacctgttatttcaaaattgacggtcagcagctatcgctgaccggcggcattgaggtgcccatgaacaggacggtcaatgatgacatcatcggcctggacggttcagtggaccgcaaggaaactcaccgtgcgccttatgtcaaagggaccttcaaggtgccgaagaattttccggtgagcaaaatcacctcgtctgatgagatgacaatcactgccgagctggcgaacggtcaggtctatgtactgtcgtctgcatggctgcacggcgaagcgaaccataatgccgaagaaggcacggttgatcttgagttccacggtgaagaaggggattaccagtaatgaaagagcttgagttaaagaaaccgattactgctcatggcgagacactctccgtactggagtttgatgagcccaccgggaaggatgtccgcgagcttgggtatccctaccagatgaatcaggatgagtcagtcagacttctggcgcatgtggtgtcgaaatacattgtgcggctggcgaaagtgccgcaaagctctgtcgaccagatgtctccggcagacctgaatgcagcggcgtggcttgtggctggttttttcctccaggcctgacggctgaatacctcactgatcgcttctttgactgcgccagctactggcgcattaatcctttcgaattgctgaatatgccgatcagtgaaattcccttactggtcagtcaggcaaacaggatagagcaggagaaacgcacacatggctgaatttgagcttaaggcgttgatcaccggtgtcgacaggctttctcccgcgctgtcgaaaatgcaaaagaaaatccggggatttaaacgccaggcggaagaagcgtcacagggtgggctggcgcttggtggcggactggcagcgggtctgacgctttccctgaaatcttatgccgatcaggaaaacgccgccaccgggctgaaagtcgccatgatggatgcgaacggcgaggttggaaagagctttcaggacatcaataaactggctattggcctgggtaaccagctacccggtacaacggctgatttccagaacatgatgcagatgctggtgcgtcaggggatcccggcagaaaacattctgggtggtgtgggtaaagcgacagcttatcttgcggtacaactgaaaaaaacaccggaagcggctgctgagtttgctgcaaagatgcaggatgctaccggaacggcgtcagaagacatgatggggctgttcgacactatccagaaggcgttttatctgggcgttgacgataccaacatgttgtccttcttcactaaaaccagttctgttctgaagatggtgaacaaggacggtcttcaggctgcacagagccttgcccccatcagcgtcatgatggatcagatggggatgaacggggagtcggcaggtaatgccctgcgaaaagttatccagtccggattaagcgttaagaaaatcagggacgttaataaagttatggcccgccagaaactcggggtacagctcgattttactgacggcaaaggaagttttggcggtcttgataacatgttcaggcaactggcaaagctgcgaaaactgaccgacgttaagcgaacaggtgtacttaaggcaatatttggtgatgatgctgaaacccttcaggtggtcaatgctctgatcgataaaggaaaggatggttacgatcagatccagcagaagatgaataaacaggccagcctgaataaacgtgttcaggcccagcttggtacgctgtccaacctgtgggaggcaatgacggggaccgcaactaacggccttgcggctattggcggcgcattttctggtgacgccaaaaatatcacgcaatggctgggagagttaggggaaaaattcacgaagtttgcggatgaaaatccccgggttattcgcggcgtcgtcgggcttgctgccggtcttgcgattctgaaactgggattgatgggcgttggcggtgccatcagtattgtcagcaggatcatgtcgatgacgccgattggaatgattgcgacggcgatagccctggctgcgggattaattatcactaactgggatgttgtcggaccttatttcaagaagctctgggaaaccattggtccttattttgaggctggctgggaacttctgaagaaggtttttgcctggtcgccgctggggatggtaatcaataactggggaccggttgttaagtggtttcaggatatgtgggacaagctgaagccaattattgagtggtttaccgacagttccggtgacacggtcgatgtcattaactctgcgcagtggggcgcgggtgcttatgatgcttatgggacgggaataccggcacggggatacacaccttatcaggcggtagatccggctcagtcaaacaacgcctccgatgccacaggcccgaatcccttcatgattaacaaagcttctgcgccaaaagttgatggtgagatcaaggtctcttttgtgaattcgcctccgggtatgcgggttatggaaacgcgatccagcggttttgatgtcagccatgatgttggctatacgcgctttggcaggtaatgaaaaattaatctgttaatgagtcccactccggtgggattttttatgtacggagtttatatgacgtggaaagacagacttcaggacgcgtcatttcgcggtgtgccgtttaaggttgaagaagaaagtgcgggaaccggtcgtcgtgtggaaacgcacgaatacccgaaccgcgacaaaccctataccgaagacctggggaaaatcactttccgcccgtccatcacagcttatgtggtgggagatgactgctttgaccagcgcgatcgcctgattgacgcgctgaataaacccggtcccggcacgcttgtccatccgacttacggtgagctgaaagtctgtgttgacggggaagttcgggtcagcacatcgaagagtgaagggcgtattgtccgctttgacctgaagtttgtcgaagcgggagaactctcttaccccacttcaggtgcggcgacggcgcagacgctgatgtcatcctgttctgcactggatgactgcatcagtgacagcttcagtggtttcagtatcgatggcgtggcagattttgtgcagaacgacgtcgtcggtaatgccagcacaatgcttgggtatgtttctgatgcgatgaaagtggtggattctgccgtatcggatgccgccaggctgttgcagggggatatctcggtacttctgccgccgccatcgtcaggcaaaaatttcgttgagcaggtgcagaaaatgtggcgtaccgggaaacgcctttatggtaacgccagcgacctggtcaccatgatcaaaacgctttccggtgtcagcctcggcagcgatctgcaaccgcgcggcgtctggaaaacggacagtaaaaccaccgccacggcgacgcagcagcgtaacgtggttgccagcacccttcgtacgaccgcaatcagcgaagcggcgtatgccgtcacccgattgcctgcgccaacaacttccgcggtgatgcagaatgccgcagtggggcaggcaacaacacccgcgcagagcactggctggccttccgtcacgcatccggcactgaacaatgcaccggcggtgaaaagcacggttgacctgccgacgtgggaagaactgactgacattcgcgacacactgaatacggcaattgataaggagttgtcccgaacaaccagtgatgcgctgtttctggcgctgcgccgggtgaaagcagatctgaatgcggatatcaacacgcgccttgaacagtctgcacggatcattcagcgcacgccggatgaggttttacccgcgctggtgctggcggcgacctggtttgataacgcggcgcgtgacgcggacattatccggcgtaatgccattacgcatcccggctttgtgccggtgatccctctgaaggtgccagtgtaatgaacgataacgtcacgctacgggtaaatggccgggagtggaatggctggacatcggtgcgcatcggtgccggtgttgaacgactggcgcgggatttcagtgtggagatcacccgccagtggccgggagatgagggtattaccacgcttcagtcgcgcattaaaaacggttcaaaagtggaggtgctgattggtgatgagctggtgatcaccggctgggtggaggcgacgcccgttcgttacgatgcccgttcggtcagcaccggtattgccggacgtagtctgaccgctgacctgattgactgtgcagccgaaccgacacagtttaacggacgatcgctggtacagattgcgcaggcgcttgctgcgcctttcggcattgaggtggtgaacagcggtgcgccgtcgggtgttattcctgatgtccagcctgatcacggtgaaacggtgattgaggtgatcaacaaaatactcggtcagcagcaggcgctggcttacgacgacccgcacggcaggctggtgattggtagtattggctcaacgcgggcacataccgcgctggtacttggggaaaacatcctttcctgcgatacggagaagagtatccgggagcggttttctgtttaccaggtggcggggcagcgtgccggaaacgacgatgatttcggtgaggccaccaccaccgcgctgcgggcccgcacagaggacgcatttattgcccgttaccgtccgatgtatatcaggcagacagggcaggctacgggggcaggctgtattgcgcgtgctgactttgaagcccggcaacgggcggcgcggacggatgaaaccacctatgtggtgcagggctggcgacagggtaacggtacgctgtggcaacccaaccagcgggtgattgtctttgatccggtctgtggttttgacaataccgaactgcttgtttcggaagtcacgtttactcaggaccagaacggcaccctgacggaaatccgtgtcggcccgcctgatgcttatctgcctgaacctgaagaccccggcgcgcggaaaaagaaaaaagccagagtacaggaggacccgttctgatgaggacgattgaagccatgcagcgacaacttctcggcctgattgggcgggcagtggtgaaaagcatcagtgccgccacgaaatgtcagaccgtggatgtgtccctgattgccggtgaacccaaagccggggttgaacatcttgaaccctacggttttaccgcaagggcaaacagcggtgcggaagcggtggtgttgtttccggatggcgaccgttctcatgcggtggttgttacggtgtcggaccggcgctaccgcatgaaagggctgcagacgggggaggtggctgtctatgacgatcaggggcagtctgtgacgctgacccgggaggggatcgtggtggacggtgcaggtaaaacgatcacgtttcgcaatgcgcccagagcacgttttgaaatggacctggaagtgaccggacaggtgaaagacctgtgcgactccggcggcaccaccatgtcagcgatgcggcttgcctataacggccatcgtcacagagagaacggtcagggcagtaacaccgacaaaccggataaagcgatggaggcatgatggaactgtggctgacggtgaacggtaaacgcacctgcgccagcgcaccgctggatccgctgacccgcgccgtggtgatttccctgttcacctggcggcgggcggagcctgatgacaatgccgacgtcccgatgggatggtggggggatacctggcctgcggtacagaatgaccgttacggctcccggctgtggctgcttcagcgcggcaaactgaccaatcagctggtgcagacggtaagggggtatatccgcgaatgcctgcaatggatgattgatgacggtgtggtgtcccgtattgatctggatatccgccgcaccgggattaatgaactgggtaacagtatcactctctggcgtcgtgacggaccggtaatgatttcttttgatgatctgtggagtgcgataacgcatggcggacagtgaatttcagcgcccgacgctggcagaaaatatcagtatgctccgtaacgatttattcgccaggctggacgtcagcgacacgctccggcgcatggatgaagacgtgcgggcaaaggtgtatgcggcggcgctgcatacggtttacggttacatcgattatctggcaatgaacatgctgcctgacctgtgcgatgagtcctggctggcgcgacatgctgcgatgaaacggtgtccgcgcaagggggccacggctgccagcgggtatatgcgctgggaaggtgtcagcgatggcctgaaggtgaccgccgggagtgttattcagcgcgatgacctggttcagtacacggcaactgccgatgcaaccagctccggtggtgtcctgcgcgtgccgatcgcctgctcaagtgcaggcgcggtcggtaacgctgacgacggtacgtcattaatcctggtcacgccggtgaatggtctgccgtcttccggcgtggcagacactctgacaggtggatttgatactgaagagctggaaacgtggcgcgcccgcgtcattgagcggtattactggacgcctcagggcggggctgacggagactatgttgtctgggctaaagaagtgccaggcattacccgtgcatggacataccgccactggatgggaacggggactgtcggtgtgatgattgccagcagtgacctgattaatcccattccggaagaatcaacggaaacggcggcaagacaacacattgagccactggccccggtggcaggctctgatttgtatgtattcaggccggtggcgcataaagtggattttcatatccgcgtgacgccggacacaccggaaatacggactgccatcaccgcggagttgcgttcgttcctgctgcgtgatggttatccgcagggagaactgaaggtgtcgcgtatcagtgaggcgatttccggtgcgaacggggaatacagccatcagttgcttgcaccggcggacaatatctccattgcaaaaaatgaactggcggtactggggacgatttcatggacgtgacaaacgatgattacatccatctgttgtcggcactgttgccccccggtccggcgtggtcagccagcgatccggcgattgccggtgcggcaccgtcattaactcgcgttcatcagcgtgcggatgccctgatgcgggagctggatccgcgcaccaccaccgaactgataaatcgctgggagcgtctgtgcggcctgccggatgaatgtattcccgcagggacacagacccttcgccagcgtcagcaacgactggatgcgaaggttaacctggcgggcggcatcaatgaggatttttaccttgcacagcttgctgccctgggcagaccagacgccaccatcacgcgatacgacaaaagcacgttcacctgctcatcggtctgtactgacgcggtgaatgcgccggaatggcggtattactggcaggtcaacatgccagccgccaccaacaccacctggatgacatgtggcgacccctgcgattccgcactgcgtatctggggggacaccgttgtcgaatgtgtgcttaacaaactctgcccgtcgcatacctacgtaatttttaaatatccggagtaatccatgcatcgtatagacacgaaaaccgcgcagaaggataagttcggcgcgggtaagaacggttttacccgtggtaacccccagaccggcacgcctgccaccgatctggatgatgactactttgacatgttgcaggaagagctttgtggcgtggtggaggcatccggtgccagcctggagaaggggaggcacgaccagctgcttaccgcgcttcgtgcgctgctgttaagccgcaagaatccgtttggcgatatcaaatcggatggcaccgtgaaaacagctctcgaaaaccttggtttgggagaaggctctgcattaccggttggggtgcctgttccgtggccttcagccactccgccaacaggctggctgaaatgcaacggtgcggctttttctgctgaagaatacccggaactggcaaaggcttacccgacaaataaattgcctgatttacgtggtgagtttatgcgtggctgggatgatggaagaggcattgatagtggtagggggattctcactgcgcaatctcatggtatgccgtctatttcaggaacgtttaatggtctttttgctgttaaacaaacaaatggtttaggtggtgtttctgtagcaaaaagtacaaatgctgaaactttatctacttcatctggatcaggttccgtgtttgattacacgtttaatgtcagcggttcgactccggtatcaccagaacttcgtccgcgtaatattgcatttaactatatcgtgagggccgcataatggataacactgcattaaatagcgagtttattgctacaaaggcgggaaatattaccgtctataactatgatggcgaaacacgggaatatatttccacatcaaatgaatatatcgctgtcggcgtcggtatcccggcaagttcctgtttagatgctcctggctcatataaagctggttatgcaatttgccgttctgcagattttaactcatgggaatatgtgccagaccatcgcggtgaaacggtctatagcactgaaacaggagaatcaaaagaaatcacagctccgggtgattaccctgaaaatacaaccactatcgccccgttaacgccatacgataaatgggatggtgagaaatgggtgacggataccgaggcacagcatagcgccgcagtacggtctgcgtttcgcaatccgtgaaggcggccgtaccgttggcgcgggcgttgttgctaaagttctgggctaattacacgttaattagttttgaattgaaaagggcgcttcggcgccctttttgcatttgttgacggcatatcttattcgtactgtcagaacgaataaattattcatatttaaaatatcaattcaatttaacattttaaatatgaatgtttctgtttttaaaatgcttcatttgtcaggctttttttttatttttaatgccgtaatttaattcatattgaagggttctcgtaaaacgtaaataattcctgcgtaggacttttgttttgcagtttttacgtcacaagggattataatgaaattaaatatatttactaaatctatgattggtatggggctggtgtgttccgctctgccagcattggcaatggaagcatggaataaccaacaaggtggtaataaatatcaggttattttcgatggcaaaatttatgaaaatgcctggtgggtttcttctacaaattgcccgggaaaagcgaaagcaaatgatgcaactaacccgtggcgtttaaagcgtaccgcaacagctgctgaaattagtcagtttggcaatacactttcctgcgaaaagagcggcagctcatcttcttcaaattcaaatacgcctgcatccaatacgccggctaatggcggttcggctacaccagcacagggcactgttccgtctaattcttctgtagttgcctggaataaacagcagggcggtcagacctggtatgtcgtctttaatggtgcggtatataaaaatgcctggtgggtagcctcttctaactgtccgggtgatgcgaaaagcaatgatgccagcaacccatggcgttatgttcgtgccgctacggcaacggaaatctcagaaaccagtaatccacagtcctgtacttcagcaccacagccttcaccggatgtgaaaccggcaccggacgttaaaccggctcctgatgttcagccagccccagctgataagtcaaacgacaactatgctgtagtagcctggaaaggtcaggaaggttcttctacatggtacgttatctataacggcggcatttataagaacgcctggtgggtaggcgcggcaaattgcccaggcgatgcgaaagaaaacgatgccagtaacccatggcgttatgttcgcgcggcaacggcaacagaaatcagccagtatggtaaccctggctcctgttccgttaagccggataataatggcggtgctgtgactccggttgatccaactccggaaacaccggtgaccccaactccggataacagcgagccatcaacaccagcggatagcgttaacgattactcattgcaagcgtggagcggccaggaaggtagcgaaatttaccatgttattttcaatggtaatgtttacaagaacgcctggtgggttgggtctaaagattgcccacggggtaccagcgctgaaaactccaataacccatggcgtctcgagcgtacagctaccgctgcggaattgagtcagtacggtaacccgactacctgtgaaattgataacggcggcgtcattgttgcggatggtttccaggccagcaaagcgtacagcgcggacagcatcgtagattataacgatgcacattataaaacttctgtcgatcaagacgcatggggctttgtcccgggcggcgataacccgtggaagaaatacgaaccggcgaaagcatggtccgcatccactgtgtacgtgaaaggtgatcgcgttgttgttgatgggcaggcttatgaagcgctgttctggacgcaaagtgacaaccctgctctggtggcgaaccaaaacgccaccggtagcaatagccgcccgtggaagccgttaggtaaggctcagagctatagcaacgaagagctgaataatgcgccgcagtttaatccagaaacgctttatgccagcgatacgctgattcgctttaacggtgtgaactacatttctcagagtaaagtgcagaaagtttctccttctgacagcaacccgtggcgtgtttttgttgactggaccggaaccaaagagcgcgtaggtacgccgaagaaagcgtggccgaaacacgtttatgcaccgtatgtcgactttacgctgaatacgatcccggatctggctgcgctggctaagaatcataacgtcaaccacttcacgctggcgtttgtggtgagtaaagatgcgaacacctgtctgccgacatggggtaccgcttacggtatgcagaattacgctcagtacagcaaaatcaaagctctgcgtgaggctggcggcgatgtgatgctgtctatcggtggtgctaacaacgctccgctggctgcttcctgtaagaacgtagacgatctgatgcagcattattatgacatcgttgataacctgaacctcaaagtcctggacttcgatatcgaaggcacctgggttgcggatcaggcatctattgaacgtcgtaaccttgctgtgaagaaagtgcaggataaatggaagtcagaaggcaaagatattgctatctggtacaccttgccaattctgccgactggcctgacgccggaagggatgaatgtcctgagcgatgccaaagcgaaaggtgttgagctggcgggtgtgaacgtgatgacaatggactacggtaacgcgatttgtcagtctgcaaataccgaaggccagaacattcacggtaagtgtgcaacgtctgcgattgccaacctgcattcacaattgaaaggcctccatcccaataagagcgatgcagaaattgacgctatgatgggtaccacgccgatggttggcgtgaacgacgttcagggcgaggtgttctatctctctgatgctcgtctggtcatgcaggatgcgcagaagcgtaatctcggtatggttggtatctggtcaatcgcgcgcgacctgccgggcggcactaacctgtctccggaattccacggcctgactaaagaacaggcaccgaagtacgcatttagcgaaatcttcgcgccgtttactaagcaataaatgtgttggcgataccttccagtatcgccgcattttttgtcaatgggctacttttggtagcccattatttttattcatatttctattctttgcttaaaaaagagtctttccgtaattgaaataagaactattttcatttatttttgaagaaagtatacgggagtctctatgtacgtttgtctttgtaatggtatcagcgataaaaaaattcgtcaggctgtgcgccagttttcccctcactcgttccagcaattaaaaaaatttattccggtcggcaatcagtgcggtaaatgtgtccgggccgcgcgtgaagtgatggaggatgaattaatgcagctgccggagtttaaggagtccgcataaacggagtgtgttttttgacttactcgtaagccgttctactcttcaaagagtggaagcgaaggagtcaaaaaatgaaaggtgatactaaagttataaattatctcaacaaactgttgggaaatgagcttgtcgcaatcaatcagtactttctccatgcccgaatgtttaaaaactggggtctcaaacgtctcaatgatgtggagtatcatgaatccattgatgagatgaaacacgccgatcgttatattgagcgcattctttttctggaaggtcttccaaacttacaggacctgggcaaactgaacattggtgaagatgttgaggaaatgctgcgttctgatctggcacttgagctggatggcgcgaagaatttgcgtgaggcaattggttatgccgatagcgttcatgattacgtcagccgcgatatgatgatagaaattttgcgtgatgaagaaggccatatcgactggctggaaacggaacttgatctgattcagaagatgggcctgcaaaattatctgcaagcacagatccgcgaagaaggttgagccgtgtcgggagggagaaccctcccggttaataagagatccaggccagataccccaggtttatcatgctgccgagcgcaagccacgggccgaatgcgatagtggttatagtccggcgttgcagaagttgtgaaacgatggcgtaaccaatgccacccagcgaggcaatcagcagtatcattggcaacgtttgccagccacaccatgcgcctgcagcggccagtagcttgaaatcaccgtagcccaatccctctttgtgacaaactaaccagacgccccagtaaacacaccacagcaccccatagcccgctaccgcgccgtaaaccgcatcatgtaaatcaattaatccatactgcgcattaaataccaagccaagccagagcagcggtaaggtgagtttgtcgggcaggagctgagtgcgaaaatcaataacactgagcgtgagtacgaaacagaaatagagaaagagtgcgccagtcacgatgggcgtgaaaggtgccagggcgcaggcgatagcagcagcaacacaaagtatcaggggcactgtatcatgccaggcatattttttttgcctgaaatgaaccaatacctggcgaaacgttaacgccgttttatcctccaacggcgagaggtgataggcgatggcattaacaaaataacctgcaataaaaccaaccagaatgaagagcggcagtagcattgtcattattgttgctccctgaaggacaaatgcctgagggtgatctcttcgtttccggcaagagtaaactgaaggtcttcaataacaataccgtatgttacctgtgccgtagtgagccagcgggagacgttttcgaggggagctgtgacaggatgaattgtcagagtattgtccgggccgttttccagcgtgatagccaaattctcacgttttgcttcctcgagaaggatatttttgatgggctgcgtaagcgcaggatgaccgagtaaaccatgggtgctcgcttgatcctgcatccatttgatgtccttcttaattttttgcgcgtgggactgatgctctgcaatgtaggtatctatcggttttatcaccccaagccaacaaaaaacgccgagcgagagaaccgccagtgccgcaacgatctgtttttccgatgtggatttttctgcccaccatgatttaatcatttccctgagttccttactgtccatacaccactgaccggatctttttctgttttttccatcggaagccaggactgtgttaactcacagaaacgatcgatattagcttcactcttagcactcatttttaaggtcagcgacttttgcttctggctatagttcgcctccattaactgcagttcagggtgttccagcagaagtgtttgtaaatgatagagcaacggcacagcttcaggatattgctgagcgagttgctgcttaaagtaaaaacgaaaattgtgggtgcgtttgatctgcgggaaataacgttgccaggtttcttgctgttgttgctgaagttgatcttcaatcttaagcgtatgccagagcgcgatgctccggctgccaacaaaagaaagaatggcgagaacgagacagcttactgccaggcgggcgagccattttcccgatttgcttacagttttctgtttacgaaaaataccatgcagcatgtcatagcgctggaatgcaatatcggcagaatacaaactcagtgatggtatttcaggatgctggataagtggattggccgctgcaacgccgtgaggtactacaccataacaaagcatattctcaggcggaaactgggcagcaagatgctgtaaccagtgttcatccagttcgttgaaggcatgtgcggcactgcgaatgagccagcttgtttgctggttaaccagagtccagctatctacttcccagggaagatagcagccatctggcaaaacccgcgtcacgttgagtccggcagtatgtaaacgctcaagatagcgactgagtttctccgactgaatgcctatcacctcgacactttcgttttgtttatcgacaaccgtccagtgccagtcctgggtgttgtcgggtaacgtctcctctgccagccattgtaatgtttgtgcggtgagtttgtatttggcgttgggcagcgtgagggaacgatataaaaggccctctggtgggatcaaaagatgaacatttccggcaccgggctgatcggccagcgactccagcggaagatcgtccgtgagcgtatgtaccgaagatacgctatctgcggagaacgtcatccattcccaatgcttacgcagcgtcgaggaagaacgtatgaccatcaacgattcaggcatcacgatccttatgattagtagagttgcagcgtacgccgatagatttgggcgctctgctgtttacggttgaaaaaaatatggctttgccatccctgggattgttcgtcgctgatactttccgtactcagcgtaaaatagcggctatagggaaagagatgccttttcacctgagcaaccagtggcttcacaccggagaaatcctgctgcgcccagtaaagaaatgcatccgtggttagccagccttccctcggccttttttgcaataagacccgagcgtcagcatccgtgatgttattgaggaataacgctctgaagagcggaatatcgttctccgttagcatattaagattgatgctaagttccgtggtcgggagaacgcagacatacgggataagccgctgatagatgttttcggttatgccttttatctgacgtaattcgccagtcagaaaaagcatctgattggcactatgccggggcggcgtctggctttggtaaaagctatcttctgcgccgtgaaagcgtggtgagtcatcgacatcaatatagtcagcgattgattgcacgatctcatcggtgtttccgcgatcgataccggcgttaatcagcagcgcactgaatacctgggcggggaaatcaggggaagccagcgggtcgtcagagatttttgctaacgcattgagattaaaacagtgctgggcatcgcgtaactgccacttcactgtattgccatcttccagctgcaactgttgtggctgtgcccagtactgctgcaactgttgtggctgtgcccagtactgctgcaacgtggtctgtctgtcgttatctttaacgtcctgggtgaggctggcaagcgcaagtttctccgccagttcaatatcatattgccgttgcagatgatggtttacctggcgggttcgctgaagctggctgtgaaaactgagcgtcatgtctgctgccagagcagccatgagcgccagtaacatgagtacaatgagcagcgcgacgccgcgttgttcattattcatggttattattcccggcctgcgtctgagctggcgactcttctctcgctaactgctcaggtaatgcaaaacggcgctgtaaccccccatattgctgagtctgcagatgtaacgtgactgagagaggaagttcctggctttccccgctgttactttccagaagaaagctctcgacatgttccagcatcgcctgggcgggttgatccttcctgccatccacagaagtacgaacagcacggtagagcgtatgatttcgcagataccagtgaacagtgagtaaggtttgtgcttcactgagaggagccagcggatcgcgactttgcgtggtaaaaatagcttcttcacccaacaccatgattttgtccgtactccgattcctccgggcgaccagttgcaggagatcgttatcaagaatggtgatggtgcgctgtagctgattgaactgctggatttctttctgtgagcgttgatgcaactcggaagcttgcgaaaaaatcataaacgccagcacgctaagcattgagaaaatcgccagcgccgccatgacctccagcaatgtgaaaccctgctggcgattaatcatcttgtgcctgcccggatttattatcgatgctttgataacgcgtaagcgaggttgtctgaccgctgggtaatgtcaccgttatggtgcgttccagaagcgtgccgtctttgcttgagtggatatcgctgcgccagttccactcttcgccatttattaactctttgccagaactggacgtgttttcctcgccgaatgaatcttgtgactgaagctggttatccgctatccacaatgccagcgtctcgttacgcattcgctcgatggcatttcgttgcccttgcatactgctcattaaagtcagagcaacagcggtgaaaatactcatcgccagtaagacttcaagcagtgtcatccctgattgtttgttcatgggcgggtatctctggcgagcgtttgatccaggggccatgagcctgaacagactaacgtcaggagcggctcaccggtcccggcgttagccatcaacaaagagaagggcgtgatttgtccgtcggccagaatcacaacctgtggctggttgctgtcatcaggtttaaatggctgaagatgaattgagagttcttcatcccagtcattttggctctcgtctgcggcatcttcttgtaatggaacccagcgccaggctgatggtgttttgcccggtaccataatgcgccatgctgaatcagagaaatggataccgacaggctgaccactgagcgtggcgcggtcgatggctaattcaagtgcagcggtaaaccgcgccgctgtttcgcgcgcacgagtgctggcgacatcctcccggccatatgtgaagagcaccacgcttgccgtgatagcgaccagcgccagcaccagcatcatctccagcagggtaaacccgcgttgctgattcatcgctgacttactttttcttcttgctcaaaccccagttggtgatgtcgtcctcggttcccatttcaccatcgggccctgctgaaagcagatcgtatgcaccatgttcaccaggattaacgaggacataatcattgccccagggatcggcaggcagacgcttgatataaccttccttgttatagtttgcggccagcggtggcagtgtcggcgcttctactaaggattcaagcccctgatttgtggttggatagtgatgattgtcgagtttgtacatatcaagggcgttttccagcgccacaatatcgctgacggctttttgcttatccgccttttctttattgcccattaggttaggaaccaccaggctggcaagtacgccgataatgacgatcaccaccataatttccagtaatgtaaaaccgcgttgcttatccgttgcgcgcatatgctttccttaattaatcattgagttaagttgaagaagaggttggagtaccgacacgacaataaacaggacgatcagtgccatcgtaataatgagtgctggctcgaagatggagagcgttaaggcgatccgattttgttggagtgtctcctggttatctgcggctctgaccattaatgtgccgagctgcccgcttttttcgccagaggccaccatgtagagcatcatcggcgggaaaattgcggtttgttccagcgaaagatgaatgctgttaccctggcgaacgttctctgccgcatttgccagacgctggcgaatttcgaggttgttgaggctttcggtggacaaattcatcccatccagcagagggacgccgctggattgcaaaatacttaaagtgcggagatagcgtgcgctgttaatggcgcaaatcagcgggccgatgagcgcaacgcgcagcaacatggcatgaaaacggtggcggttattgccgcgttttaaccagagccagaaacctacagcgacaataaacactgtcgctaataatgtcgggccggtacgttgcaacgtgtcgctcagacctaaaagaatgcgtgtactcagcggcagttgctgcttcatatgcacgaactgttcggtaattttgggcacgacagcagtgaggagaataatcacgaccccaatcgccaccgtagtgagcatacaggggtagatcagtgactgaatgagcttgctgcggattttctgccggttttcattgtaatcagccagcttttccaacaccggggccagcagcccgctcttttcgcccgcttttaccagggtacgatagagcgaatcgaaaagcgtgggaaaatgctgtaatgcatcggaaaggggatgcccttcaaggatggcgctgcgtacctgatttaacacgtcacccagtcgtttattactgctttgttgaccgattacggcaaggctctcttccaggggtaatgccgctgcgcttaaggttgccaactgccgggtgaaaagcgtcagttcactatggctgatcctcgggcgacgtgtttttactcccgaacttttttgggggcgaatatccagcaggaaaagcccttcttcacgcagccgcagtcgtgcctgacgttcatcgttagcatcaatgatcccttgcaatttttgaccatcctgggtcatggcgcgatagcgataattcatgcttcgctctccagcgtggcactggcgacgcgcataacctcatcccaggaggtgtcaccgcttatcactttttgcaggccatttttgattaaggccttgtgttgttgccggactagtcgctccagtgcttgttcatccacattttcatgaatagcggcccgtaattccggcgtcaccaccatcatttcgtggatcgccatgcgcccctgatagccggattgatggcaatgagggcagcctacgggagtgccaattgttgtcaccgcgagctgatgatatttaaacatctgcgcttgttggggtgatacgggcgtgaattgtcggcattgcggacacaggcgacgaaccagacgttgcgcgataatccctgccagggaagacgaaagcaggaatgattcgacgcccatgtcgcggagccgggtcactgcgcctgatgcactgttagtgtggagtgttgagagtaccagatggccggtgagcgaggcctgaaccgcaatctgcgcggtttctgtatcacgaatttcccccaccatgacgacatccgggtcctggcgaagtatggcgcgcaggccgcgagcgaaagacatatccacacgggtattcacctgcgtttgcccaatgccttccagctcatattccacgggatcttctaccgtcagaatattgcggccgggagtattcagcgccgaaaggatggcgtagagcgtggtgcttttaccggagcctgtcggccctgtcaccaggataataccgtgcggaagctgaatgagattttctaaatcctgcttatccgctgccgtcatccccaggttgttcaatgaaagctggaggctgtttttatccagcaggcggagtacggcgcgttcaccatagatggacggcagtgtggatacgcggacatctatgttacgtcgcccgatacgcaaactaattcttccatcctgtggaatacgtttttcggcgatatcaagacgagccatgaccttaattcgggagataagcagtgccgccagttttttgtttggctgtaaaattgtccgcaaaacgccgtcgatgcgaaaacggatcgacattgttttttcataggtttcaatgtggatatcagaggcggtttctttgatggcctcactcaaaatcgcattgatcaagcggataaccggtgccgctgaatcttcattcaggagatcttcatttgcgggcatctcttccgaaagcgagagaagatcgacggattgatcgatatcctgcgcaatctgttgcgactcaccggtattctgatggaataccgcttccagccgagcttcaaaatcagcctgtgacaagctggtcatggtctggcactggccaacctgacgttgaatatcgagtaaccgctcgaatggcgtatcggcgagataaataatctcgccctctgaatagagataaccaattcgttgtgccagcgcccaactggcggggtacggtgagtgaattctcatatgaatgcctcaccgtgacgatggcgcaggggcgtgactgttgaacgtgttttcatccagcaccggcaaatcttccgagccaaccagcgcttttgatttcccgtcgatccgctgttgttgctcctgacggtaacgggtgtatttctcttttgacagtgagcgataaacatcatcgtcacggataatcgtcggacggataaataccatcaggttgcgtttagcgcgctcggtggaggtatagcggaagagttgccccactaaaggaatatcgccaagcagaggaacctttgacacttgctctttagaaaaatcatccagcaatccgcccaggaccaccgtttcaccggttttgaccagcacggcgttttgaatagtacgggtattaaacgtcgggccgagcgtcgagttagaggaagagtcaacgctggagacttcctgctctatttcgagcaacaccgcgtcgccttcattgacctgcggagtaactttgagttttgtccccaccgttttgcgttcgacggtattaaagacgttatcccctgaagtggtctgtgacccggatagcaccggcacatcctgccccacgttgaaggacgcgagtttattatccagcgttacgatgcttggggtggcgaggatgtcatttttattgttactggccagcgcggtaagcagtactccccagtcgccattgaagaagcctgcggccatgccattgtaggcgctaaacatatcccaggcaggattcgcgctggtgatcccaccattctttttataatcagccacaccttgcgcagcgttaaaaatcggtaatccggtattggtaaattgctgtgcgccaacgtttttattcgcccattgcacgccgaggtttagtccatttccatcctgaacttcaacgatgattgcctcaaccagcacctgtgcacggcgaatgtccagacgcgcaattaccgtggcgagtttttcctggacggactggtcagcggtaatgaccagagagttagtctgttcatcggcggtaatggcgacgttatccatcgcgccagaagaggagggcttacgcgcattccctttttcatctttcagcttttcggaaacaccggttagcacttccaccagattcgtggctttagcatatttcaggtaataaacccgggtatttccttcctcgctctcttcgacatcaaggcttttcagtaatgaagtgatgcgctggcgtgctttttccggtccactgatgataagagagttggttcgcttatccgccacaatcttcgcggagaggagggctggcatctggcttttaccgtggctttcgctgattaattgattaagaatctcggcgagatcttccgctgacgcatattccagatgaataatttgctgcttctctgtgccgatgacatcaacgcgctttatgacttcaatcagtttattaatggtggaggcacgaccggtcagaataagaacgttggagggttcataatgcacaacattaccgacgctacccgcatccatcatctggcggagcaggggggccaggtcacgagcaggaacgttctcaagcggtacaattcgggtgaccaactcatcacctacgcctggacgagaactgtcagcaatcatccctggcgatgtttttacattagctgagcgaaccactttcagaaaaccattgtccagcgtgatcacggaataaccgtaaagatcaagaatacttaaaaagaactggtagtactcctgttggctaaacgtatcattactgcgtacggaaatggttccctgtaccgaagggtcgatcaggatcgttttgccaagatgctgacccactatttccacgaactggcggatatcggcgttattgaagttcgcgccgtattgttcgttctcagcgtgtcctgcacaaggcatgagtagtgctgccagcaagcagcaggtgattttattgagtcctttcatgacgcagtccattcattcctgtaagttccccgacggaaacatttatcaagcggggtacgccgttgcgacgaattgtaaactgagcactttgttgagttagcagtaaacttaatgcctgtgaaacctcatcagggtgggtcagcgaaagattattgatcctgagggcgatatcccctggttgtagcaagctggtggtaaatgcattgaggcccttacgagggttcaatcgaagcccgtatatctgttctccatcacgtataggcgtggcgataatataatcagcgagtacattttgactttctgaatcaggctgcttgatgatgtcaggtagccctggatggagagttactttttcgtaatgcccgtgagtttcaaacacaacgctggttttatttatttttctaataaacgttcccggcgctgactcaagggcttcgttgagggagtatcgcttttgttcgctcccctcattaattaagacaaaagaagtctcatcattcgatgtgagtacaatgccattaagcgctatagagagcttaggtgtttcctgattaactgccacgggatttgcatcttttaccccagcatgattttcgttacgccataaagcggcaaggctgaaatcagactgaaatgcgtttgttggttgattaatgatctgtccatttttaactatagttgtatggaaataattcacattaaaaataatcgaccctatgcttataaatataatcaatatattgatggcagcatctttattatgattcgccagatggaaggggaaacgtagtgtgggcacgatgtatgttctaataaaatagattgggtgggttgtatattgacgttagtataaatagtattaatgccgcttgcatgaatcaagcaaaatttatttatattagtaatatgtatttaattaataaatacatacattatttttatgattaaggataatcaataattaaaacaggaagttctatgtctacgagaagagaagttattctttcctggttgtgtgagaaacgtcaaacctggcgtctatgctatttgttgggtgaggctggaagtggaaaaacctggctggcgcagcaactgcaaaaagataaacatcgccgtgtgattactttaagcctcgttgtttcctggcaaggtaaggccgcatggatcgttaccgacgataacgcggctgaacagggctgccgtgacagcgcctggacgcgagatgagatggcggggcaattactgcatgcgcttcatcgaactgatagtcgctgccctcttattattattgaaaatgctcacctgaatcaccgccgcatacttgatgatctccaacgcgcaatatctcttattcctgacggtcaatttttgctgatcggcagacccgatcgaaaagtcgaacgtgattttaaaaaacagggcattgaacttgtctcgataggacgtctgacggagcacgaacttaaggcaagcatccttgaaggtcagaatattgaccaacccgatctccttttaaccgccagagttctgaaacggatagctttattatgtcggggcgatcgcagaaagctggcgcttgccggcgaaacaattcgcttattacagcaagccgagcagaccagcgttttcacagcaaaacaatggcgaatgatttaccgcatattgggtgataaccgcccccggaaaatgcagcttgccgtggtgatgagtggaaccattatcgctcttacctgtggttggctactgctgtcctcttttacagctacgttacccgttcctgcgtggctgatacccgtaacgccagtagttaaacaagatatgactaaggatattgctcatgtggtgatgcgcgatagtgaggcgctaagcgtgttatacggcgtatgggggtacgaggtcccagctgattcggcctggtgcgatcaggcagtaagagcggggctggcatgtaaaagtgggaatgcttctttacaaacattggtagatcagaatttgccctggatcgcatcgcttaaagtcggggacaaaaaattgcctgttgtggtcgttcgcgtcggtgaggctagcgttgatgtcctcgtaggtcagcaaacgtggacgctgacacataaatggtttgagtcggtatggacgggtgattatcttctgttgtggaaaatgtcgccggaaggggagagtaccattacgcgtgatagcagcgaggaagagattctctggctggaaacgatgttaaaccgcgcattgcatatttcgacagaaccttcggcggagtggcgtcccttgttggtagaaaaaataaagcaatttcaaaaaagccaccacttgaaaactgacggtgttgttggcttttcaacgttagtacatctctggcaggtggcaggggagagtgcctacttatatcgggatgaagcaaatatttccccggaaacaacagtgaaggggaaatgacatgtttgaattctatatcgccgcgcgtgagcagaaagaaacaggtcaccctggtatcttctcccgacaaaaacacagcaccataatatatgtaatttgtttattactgatttgcctgtggtttgcaggaatggtgctggttggtgggtatgccaggcagctatgggtgctttggatagtaaaagccgaagtcactgtagaggctgaaacgcccgcttttaaacaatcaacacaacactatttcttcaaaaaacagccactccccgtcgtcgaatccgtcgaggaggaagatgacccaggcgtcgcggttgagaatgccccctcttcttctgaagacgaagaaaatactgtggaagaaagcgaagagaaagccggtttaagagagcgtgtcaaaaatgcactgaacgaacttgagagataacccgaaggctgtttactttactagcaatacgcttgcgttcggtggttaagtatgtataatgcgcgggcttgtcgtagttgacagcaggttcaatctgaacctcagttagccgaatttggctacctaacaatgctcccaatcggggagctacgtaagaacggttacactctcccatcaatcgtaatgggtctgaggagtaatcattttcgtttataaaataattggagctctggtctcatgcagaaccaaagaatccgtatccgcctgaaagcgtttgatcatcgtctgatcgatcaagcaaccgcggaaatcgtcgagactgccaagcgcactggtgcgcaggtccgtggtccgatcccgctgccgacacgcaaagagcgcttcactgttctgatctccccgcacgtcaacaaagacgcgcgcgatcagtacgaaatccgtactcacttgcgtctggttgacatcgttgagccaaccgagaaaaccgttgatgctctgatgcgtctggatctggctgccggtgtagacgtgcagatcagcctgggttaatcaggtcattgagcgattgagaggttgaaacaatgattggtttagtcggtaaaaaagtgggtatgacccgtatcttcacagaagacggcgtttctatcccagtaaccgtaatcgaagttgaagcaaaccgcgttactcaggttaaagacctggctaacgatggctaccgtgctattcaggtgaccaccggtgctaaaaaagctaaccgtgtgaccaagcctgaagctggccacttcgctaaagctggcgtagaagctggccgtggtctgtgggaattccgcctggctgaaggcgaagagttcactgtaggtcagagcattagcgttgaactgtttgctgacgttaaaaaagttgacgtaactggcacctctaaaggtaaaggtttcgcaggtaccgttaagcgctggaacttccgtacccaggacgctactcacggtaactccttgtctcaccgcgttccgggttctatcggtcagaaccagactccgggcaaagtgttcaaaggcaagaaaatggcaggtcagatgggtaacgaacgtgtaaccgttcagagccttgacgtagtacgcgttgacgctgagcgcaacctgctgctggttaaaggtgctgtcccgggtgcaaccggtagcgacctgatcgttaaaccagctgtgaaggcgtaaggagatagcaatggaattagtattgaaagacgcgcagagcgcgctgactgtttccgaaactaccttcggtcgtgatttcaacgaagcgctggttcaccaggttgttgttgcttatgcagctggtgctcgtcagggtactcgtgctcagaagactcgtgctgaagtaactggttccggtaaaaaaccgtggcgccagaaaggcaccggccgtgcgcgttctggttctatcaagagcccgatctggcgttctggtggcgtgacctttgctgctcgtccgcaggaccacagtcaaaaagttaacaagaagatgtaccgcggcgcgctgaaaagcatcctgtccgaactggtacgtcaggatcgtctgatcgttgtcgagaagttctctgtagaagcgccgaaaactaagctgctggcacagaaactgaaagacatggctctggaagatgtgctgatcatcaccggtgagctggacgaaaacctgttcctggctgcgcgcaacctgcacaaggttgacgtacgcgatgcaactggtatcgacccggttagcctgatcgccttcgacaaagtcgtaatgactgctgatgctgttaagcaagttgaggagatgctggcatgattcgtgaagaacgtctgctgaaggtgctgcgtgcaccgcacgtttctgaaaaagcgtctactgcgatggaaaaatccaacaccatcgtactcaaagttgctaaagacgcgaccaaagcagaaatcaaagctgctgtgcagaaactgtttgaagtcgaagtcgaagtcgttaacaccctggtagttaaagggaaagttaaacgtcacggacagcgtatcggtcgtcgtagcgactggaaaaaagcttacgtcaccctgaaagaaggccagaatctggacttcgttggcggcgctgagtaagtcggaggagtaatacaatggcagttgttaaatgtaaaccgacatctccgggtcgtcgccacgtagttaaagtggttaaccctgagctgcacaagggcaaaccttttgctccgttgctggaaaaaaacagcaaatccggtggtcgtaacaacaatggccgtatcaccactcgtcatatcggtggtggccacaagcaggcttaccgtattgttgacttcaaacgcaacaaagacggtatcccggcagttgttgaacgtcttgagtacgatccgaaccgttccgcgaacatcgcgctggttctgtacaaagacggtgaacgccgttacatcctggcccctaaaggcctgaaagctggcgaccagattcagtctggcgttgatgctgcaatcaaaccaggtaacaccctgccgatgcgcaacatcccggttggttctactgttcataacgtagaaatgaaaccaggtaaaggcggtcagctggcacgttccgctggtacttacgttcagatcgttgctcgtgatggtgcttatgtcaccctgcgtctgcgttctggtgaaatgcgtaaagtagaagcagactgccgtgcaactctgggcgaagttggcaatgctgagcatatgctgcgcgttctgggtaaagcaggtgctgcacgctggcgtggtgttcgtccgaccgttcgcggtaccgcgatgaacccggtagaccacccacatggtggtggtgaaggtcgtaactttggtaagcacccggtaactccgtggggcgttcagaccaaaggtaagaagacccgcagcaacaagcgtactgataaattcatcgtacgtcgccgtagcaaataattttagaggataagccatgccacgttctctcaagaaaggtccttttattgacctgcacttgctgaagaaggtagagaaagcggtggaaagcggagacaagaagcccctgcgcacttggtcccgtcgttcaacgatctttcctaacatgatcggtttgaccatcgctgtccataatggtcgtcagcacgttccggtatttgtaaccgacgaaatggttggtcacaaactgggtgaattcgcaccgactcgtacttatcgcggccacgctgctgataaaaaagcgaagaagaaataaggtaggaggaagagatggaaactatcgctaaacatcgccatgctcgttcttctgctcagaaggttcgccttgttgctgacctgattcgcggtaagaaagtgtcgcaggctctggatattttgacctacaccaacaagaaagcggctgtactggtcaagaaagttctggaatctgccattgctaacgctgaacacaacgatggcgctgacattgacgatctgaaagttacgaaaattttcgtagacgaaggcccgagcatgaagcgcattatgccgcgtgcaaaaggtcgtgcagatcgcatcctgaagcgcaccagccacatcactgtggttgtgtccgatcgctgagactctggagactagcaatgggtcagaaagtacatcctaatggtattcgcctgggtattgtaaaaccatggaactctacctggtttgcgaacaccaaagaattcgctgacaacctggacagcgattttaaagtacgtcagtacctgactaaggaactggctaaagcgtccgtatctcgtatcgttatcgagcgtccggctaagagcatccgtgtaaccattcacactgctcgcccgggtatcgttatcggtaaaaaaggtgaagacgtagaaaaactgcgtaaggtcgtagcggacatcgctggcgttcctgcacagatcaacatcgccgaagttcgtaagcctgaactggacgcaaaactggttgctgacagcatcacttctcagctggaacgtcgcgttatgttccgtcgtgctatgaagcgtgctgtacagaacgcaatgcgtctgggcgctaaaggtattaaagttgaagttagcggccgtctgggcggcgcggaaatcgcacgtaccgaatggtaccgcgaaggtcgcgtaccgctgcacactctgcgtgctgacatcgactacaacacctctgaagcgcacaccacttacggtgtaatcggcgttaaagtgtggatcttcaaaggcgagatcctgggtggtatggctgctgttgaacaaccggaaaaaccggctgctcagcctaaaaagcagcagcgtaaaggccgtaaataaggagcgtcgctgatgttacaaccaaagcgtacaaaattccgtaaaatgcacaaaggccgtaaccgcggtctggcgcagggtacggatgttagcttcggcagcttcggtctgaaagctgttggccgtggtcgtctgactgcccgtcagatcgaagcagcacgtcgtgctatgacccgtgcagttaagcgtcaaggtaagatctggatccgtgtgttcccggacaaaccgatcactgaaaagccgctggcagtgcgtatgggtaaaggtaaaggtaacgtggagtattgggttgccttgattcagccgggtaaagtcctgtatgaaatggacggtgttccggaagagctggcccgtgaagcattcaagctggcagcagcgaaactgccgattaaaaccacctttgtaactaagacggtgatgtaatgaaagcaaaagagctgcgtgagaagagcgttgaagagctgaacaccgagctgctgaacctgctgcgtgagcagttcaacctgcgtatgcaggctgcaagtggccagctgcaacagtctcacctgttgaagcaagtgcgtcgcgatgtcgcacgcgttaagactttactgaacgagaaggcgggtgcgtaatgaccgataaaatccgtactctgcaaggtcgcgttgttagcgacaaaatggagaaatccattgttgttgctatcgaacgttttgtgaaacacccgatctacggtaaattcatcaagcgtacgaccaaactgcacgtacatgacgagaacaacgaatgcggtatcggtgacgtggttgaaatccgcgaatgccgtccgctgtccaagactaaatcctggacgctggttcgcgttgtagagaaagcggttctgtaatacagtacactctctcaatacgaataaacggctcagaaatgagccgtttattttttctacccatatccttgaagcggtgttataatgccgcgccctcgatatggggatttttaacgacctgattttcgggtctcagtagtagttgacattagcggagcactaaaatgatccaagaacagactatgctgaacgtcgccgacaactccggtgcacgtcgcgtaatgtgtatcaaggttctgggtggctcgcaccgtcgctacgcaggcgtaggcgacatcatcaagatcaccatcaaagaagcaattccgcgtggtaaggtcaaaaaaggtgatgtgctgaaggcggtagtggtgcgcaccaagaagggtgttcgtcgcccggacggttctgtcattcgcttcgatggtaatgcttgtgttcttctgaacaacaacagcgagcagcctatcggtacgcgtatttttgggccggtaactcgtgagcttcgtagtgagaagttcatgaaaattatctctctggcaccagaagtactctaaggagcgaatcatggcagcgaaaatccgtcgtgatgacgaagttatcgtgttaaccggtaaagataaaggtaaacgcggtaaagttaagaatgtcctgtcttccggcaaggtcattgttgaaggtatcaacctggttaagaaacatcagaagccggttccggccctgaaccaaccgggtggcatcgttgaaaaagaagccgctattcaggtttccaacgtagcaatcttcaatgcggcaaccggcaaggctgaccgtgtaggctttagattcgaagacggtaaaaaagtccgtttcttcaagtctaacagcgaaactatcaagtaatttggagtagtacgatggcgaaactgcatgattactacaaagacgaagtagttaaaaaactcatgactgagtttaactacaattctgtcatgcaagtccctcgggtcgagaagatcaccctgaacatgggtgttggtgaagcgatcgctgacaaaaaactgctggataacgcagcagcagacctggcagcaatctccggtcaaaaaccgctgatcaccaaagcacgcaaatctgttgcaggcttcaaaatccgtcagggctatccgatcggctgtaaagtaactctgcgtggcgaacgcatgtgggagttctttgagcgcctgatcactattgctgtacctcgtatccgtgacttccgtggcctgtccgctaagtctttcgacggtcgtggtaactacagcatgggtgtccgtgagcagatcatcttcccagaaatcgactacgataaagtcgaccgcgttcgtggtttggatattaccattaccactactgcgaaatctgacgaagaaggccgcgctctgctggctgcctttgacttcccgttccgcaagtaaggtagggttactaaatggctaagcaatcaatgaaagcacgcgaagtaaaacgcgtagctttagctgataaatacttcgcgaaacgcgctgaactgaaagcgatcatctctgatgtgaacgcttccgacgaagatcgttggaacgctgttctcaagctgcagactctgccgcgtgattccagcccgtctcgtcagcgtaaccgctgccgtcaaacaggtcgtccgcatggtttcctgcggaagttcgggttgagccgtattaaggtccgtgaagccgctatgcgcggtgaaatcccgggtctgaaaaaggctagctggtaattgtcaccaattgaatcacgggagtaaagacagatgagcatgcaagatccgatcgcggatatgctgacccgtatccgtaacggtcaggccgcgaacaaagctgcggtcaccatgccttcctccaagctgaaagtggcaatcgccaacgtgctgaaggaagaaggttttattgaagattttaaagttgaaggcgacaccaagcctgaactggaacttactctgaagtatttccagggcaaagctgttgtagaaagcattcagcgtgtcagccgcccaggtctgcgcatctataaacgtaaagatgagctgccgaaagttatggcgggtctgggtatcgcagttgtttctacctctaaaggtgttatgactgatcgtgcagcgcgccaggctggtcttggtggcgaaattatctgctacgtagcctaatcggaggaaaaaatgtctcgtgttgctaaagcaccggtcgttgttcctgccggcgttgacgtaaaaatcaacggtcaggttattacgatcaaaggtaaaaacggcgagctgactcgtactctcaacgatgctgttgaagttaaacatgcagataataccctgaccttcggtccgcgtgatggttacgcagacggttgggcacaggctggtaccgcgcgtgccctgctgaactcaatggttatcggtgttaccgaaggcttcactaagaagctgcagctggttggtgtaggttaccgtgcagcggttaaaggcaatgtgattaacctgtctctgggtttctctcatcctgttgaccatcagctgcctgcgggtatcactgctgaatgtccgactcagactgaaatcgtgctgaaaggcgctgataagcaggtgatcggccaggttgcagcggatctgcgcgcctaccgtcgtcctgagccttataaaggcaagggtgttcgttacgccgacgaagtcgtgcgtaccaaagaggctaagaagaagtaaggtaacactatggataagaaatctgctcgtatccgtcgtgcgacccgcgcacgccgcaagctccaggagctgggcgcaactcgcctggtggtacatcgtaccccgcgtcacatttacgcacaggtaattgcaccgaacggttctgaagttctggtagctgcttctactgtagaaaaagctatcgctgaacaactgaagtacaccggtaacaaagacgcggctgcagctgtgggtaaagctgtcgctgaacgcgctctggaaaaaggcatcaaagatgtatcctttgaccgttccgggttccaatatcatggtcgtgtccaggcactggcagatgctgcccgtgaagctggccttcagttctaaggtagaggtgtaagatggctcacatcgaaaaacaagctggcgaactgcaggaaaagctgatcgcggtaaaccgcgtatctaaaaccgttaaaggtggtcgtattttctccttcacagctctgactgtagttggcgatggtaacggtcgcgttggttttggttacggtaaagcgcgtgaagttccagcagcgatccagaaagcgatggaaaaagcccgtcgcaatatgattaacgtcgcgctgaataacggcactctgcaacaccctgttaaaggtgttcacacgggttctcgcgtattcatgcagccggcttccgaaggtaccggtatcatcgccggtggtgcaatgcgcgccgttctggaagtcgctggggttcataacgttctggctaaagcctatggttccaccaacccgatcaacgtggttcgtgcaactattgatggcctggaaaatatgaattctccagaaatggtcgctgccaagcgtggtaaatccgttgaagaaattctggggaaataaaccatggcaaagactattaaaattactcaaacccgcagtgcaatcggtcgtctgccgaaacacaaggcaacgctgcttggcctgggtctgcgtcgtattggtcacaccgtagagcgcgaggatactcctgctattcgcggtatgatcaacgcggtttccttcatggttaaagttgaggagtaagagatgcgtttaaatactctgtctccggccgaaggctccaaaaaggcgggtaaacgcctgggtcgtggtatcggttctggcctcggtaaaaccggtggtcgtggtcacaaaggtcagaagtctcgttctggcggtggcgtacgtcgcggtttcgagggtggtcagatgcctctgtaccgtcgtctgccgaaattcggcttcacttctcgtaaagcagcgattacagccgaaattcgtctgtctgacctggctaaagtagaaggcggtgtagtagacctgaacacgctgaaagcggctaacattatcggtatccagatcgagttcgcgaaagtgatcctggctggcgaagtaacgactccggtaactgttcgtggcctgcgtgttactaaaggcgctcgtgctgctatcgaagctgctggcggtaaaatcgaggaataagtagcagatggctaaacaaccgggattagattttcaaagtgccaaaggtggcttaggcgagctgaaacgcagactgctgtttgttatcggtgcgctgattgtgttccgtattggctcttttattccgatccctggtattgatgccgctgtacttgccaaactgcttgagcaacagcgaggcaccatcattgagatgtttaacatgttctctggtggtgctctcagccgtgcttctatctttgctctggggatcatgccgtatatttcggcgtcgatcattatccagctgctgacggtggttcacccaacgttggcagaaattaagaaagaaggggagtctggtcgtcgtaagatcagccagtacacccgctacggtactctggtgctggcaatattccagtcgatcggtattgctaccggtctgccgaatatgcctggtatgcaaggcctggtgattaacccgggctttgcattctacttcaccgctgttgtaagtctggtcacaggaaccatgttcctgatgtggttgggcgaacagattactgaacgaggtatcggcaacggtatttcaatcattatcttcgccggtattgtcgcgggactcccgccagccattgcccatactatcgagcaagcgcgtcaaggcgacctgcacttcctcgtgttgctgttggttgcagtattagtatttgcagtgacgttctttgttgtatttgttgagcgtggtcaacgccgcattgtggtaaactacgcgaaacgtcagcaaggtcgtcgtgtctatgctgcacagagcacacatttaccgctgaaagtgaatatggcgggggtaatcccggcaatcttcgcttccagtattattctgttcccggcgaccatcgcgtcatggttcgggggcggtactggttggaactggctgacaacaatttcgctgtatttgcagcctgggcaaccgctttatgtgttactctatgcgtctgcaatcatcttcttctgtttcttctacacggcgttggttttcaacccgcgtgaaacagcagataacctgaagaagtccggtgcatttgtaccaggaattcgtccgggagagcaaacggcgaagtatatcgataaagtaatgacccgcctgaccctggttggtgcgctgtatattacctttatctgcctgatcccggagttcatgcgtgatgcaatgaaagtaccgttctacttcggtgggacctcactgcttatcgttgttgtcgtgattatggactttatggctcaagtgcaaactctgatgatgtccagtcagtatgagtctgcattgaagaaggcgaacctgaaaggctacggccgataattggtcgcccgagaagttacggagagtaaaaatgaaagttcgtgcttccgtcaagaaattatgccgtaactgcaaaatcgttaagcgtgatggtgtcatccgtgtgatttgcagtgccgagccgaagcataaacagcgccaaggctgattttttcgcatatttttcttgcaaagttgggttgagctggctagattagccagccaatcttttgtatgtctgtgcgtttccatttgagtatcctgaaaacgggcttttcagcatggaacgtacatattaaatagtaggagtgcatagtggcccgtatagcaggcattaacattcctgatcataagcatgccgtaatcgcattaacttcgatttatggcgtcggcaagacccgttctaaagccatcctggctgcagcgggtatcgctgaagatgttaagatcagtgagctgtctgaaggacaaatcgacacgctgcgtgacgaagttgccaaatttgtcgttgaaggtgatctgcgccgtgaaatcagcatgagcatcaagcgcctgatggatcttggttgctatcgcggtttgcgtcatcgtcgtggtctcccggttcgcggtcagcgtaccaagaccaacgcacgtacccgtaagggtccgcgcaaaccgatcaagaaataatcggggtgattgaataatggcaaaggcaccaattcgtgcacgtaaacgtgtaagaaaacaagtctctgacggcgtggctcatatccatgcttctttcaacaacaccatcgtgactatcactgatcgtcagggtaacgcgttgggttgggcaacagccggtggttccggtttccgtggttctcgcaaatccactccgtttgcagctcaggttgcagcagagcgttgcgctgacgccgtgaaagaatacggcatcaagaatctggaagttatggttaaaggtccgggtccaggccgcgaatctactattcgtgctctgaacgccgcaggtttccgcatcactaacattactgatgtgactccgatccctcataacggttgtcgtccgccgaaaaaacgtcgcgtataacgcctcgttttccaggtttgttggagaaagaaaatggcaagatatttgggtcctaagctcaagctgagccgtcgtgagggcaccgacttattccttaagtctggcgttcgcgcgatcgataccaagtgtaaaattgaacaagctcctggccagcacggtgcgcgtaaaccgcgtctgtctgactatggtgtgcagttgcgtgaaaagcaaaaagttcgccgtatctatggtgtgctggagcgtcagttccgtaactactacaaagaagcagcacgtctgaaaggcaacaccggtgaaaacctgttggctctgctggaaggtcgtctggacaacgttgtataccgtatgggcttcggtgccactcgtgcagaagcacgtcagctggttagccataaagcaattatggtaaacggtcgtgttgttaacatcgcttcttatcaggttagtccgaatgacgttgtaagcattcgtgagaaagcgaagaagcagtctcgcgtgaaagccgctctggagctggctgagcagcgtgaaaagccaacctggctggaagttgatgctggcaagatggaaggtacgtttaagcgtaagccggagcgttctgatctgtctgcggacattaacgaacacctgatcgtcgagctttactccaagtaaagcttagtaccaaagagaggacacaatgcagggttctgtgacagagtttctaaaaccgcgcctggttgatatcgagcaagtgagttcgacgcacgccaaggtgacccttgagcctttagagcgtggctttggccatactctgggtaacgcactgcgccgtattctgctctcatcgatgccgggttgcgcggtgaccgaggttgagattgatggtgtactacatgagtacagcaccaaagaaggcgttcaggaagatatcctggaaatcctgctcaacctgaaagggctggcggtgagagttcagggcaaagatgaagttattcttaccttgaataaatctggcattggccctgtgactgcagccgatatcacccacgacggtgatgtcgaaatcgtcaagccgcagcacgtgatctgccacctgaccgatgagaacgcgtctattagcatgcgtatcaaagttcagcgcggtcgtggttatgtgccggcttctacccgaattcattcggaagaagatgagcgcccaatcggccgtctgctggtcgacgcatgctacagccctgtggagcgtattgcctacaatgttgaagcagcgcgtgtagaacagcgtaccgacctggacaagctggtcatcgaaatggaaaccaacggcacaatcgatcctgaagaggcgattcgtcgtgcggcaaccattctggctgaacaactggaagctttcgttgacttacgtgatgtacgtcagcctgaagtgaaagaagagaaaccagagttcgatccgatcctgctgcgccctgttgacgatctggaattgactgtccgctctgctaactgccttaaagcagaagctatccactatatcggtgatctggtacagcgtaccgaggttgagctccttaaaacgcctaaccttggtaaaaaatctcttactgagattaaagacgtgctggcttcccgtggactgtctctgggcatgcgcctggaaaactggccaccggcaagcatcgctgacgagtaaccggatcacaggttaaggttttactgagaaggataaggtcatgcgccatcgtaagagtggtcgtcaactgaaccgcaacagcagccatcgccaggctatgttccgcaatatggcaggttcactggttcgtcatgaaatcatcaagacgactctgcctaaagcgaaagagctgcgccgcgtagttgagccgctgattactcttgccaagactgatagcgttgctaatcgtcgtctggcattcgcccgtactcgtgataacgagatcgtggcaaaactgtttaacgaactgggcccgcgtttcgcgagccgtgccggtggttacactcgtattctgaagtgtggcttccgtgcaggcgacaacgcgccgatggcttacatcgagctggttgatcgttcagagaaagcagaagctgctgcagagtaatctgaagcaacgtaaaaaaacccgccccggcgggtttttttatacccgtagtatccccacttatctacaatagctgtactctttttgttcatcccctggagtatttatgtggttacttgaccagtgggcagagcgccatatagcagaagcgcaagcgaaaggtgagtttgataacctggcaggtagcggcgaaccattgatactggatgatgattctcacgtgccaccggaattacgtgcggggtatcgcttgctgaagaatgccggttgcttaccgccagaacttgagcaacggagagaagcaattcagcttctggatattctcaaaggtatccgtcacgatgatccgcaatatcaagaggttagccgtcgattgtcattactggaattgaagctgcgacaagctggattgagtaccgattttttacgcggcgattatgctgacaagttgttggacaaaatcaacgataactagtggagtatgtatgtatcgcattggtgagctggcaaaaatggcggaagtaacacccgacacgattcgttattacgaaaaacagcagatgatggagcatgaagtgcgtactgaaggtgggtttcgcctatataccgaaagcgatctccagcgattgaaatttatccgccatgccagacaactaggtttcagtctggagtcgatccgcgagttgctgtcgatccgcatcgatcctgaacaccatacctgtcaggagtcaaaaggcattgtgcaggaaagattgcaggaagtcgaagcacggatagccgagttgcagagtatgcagcgttccttgcaacgccttaacgatgcctgttgtgggactgctcatagcagtgtttattgttcgattcttgaagctcttgaacaaggggcgagtggcgttaagagtggttgttgattttttgcactggcaggattacactcgcgccgttaaataaccaactggagtttttatgagtcgatatcagcatactaaagggcagataaaggataatgcgatagaagcattactacatgatcccttattccgacagcgcgtagagaaaaataagaaggggaaaggcagttacatgcgaaaaggaaaacatggcaatcgggggaactgggaggccagtggcaagaaagtaaatcacttttttaccactggtcttctgctttcaggcgcttgttaagagcggttattctgctctttcagcaaatcacgaatttctgtcagtaatacttcttctttagttggtgcaggtgcggctgctggttcttcttttttccgattcagtttgttgattagcttaatcgccataaagatggcaaaggccacaatcagaaaatcaaagacgttttgaatgaagacaccgtaatgcatcacaacagcagggatatccccctgcgcatcgcgtagcgtgacagcaaactgtttaaaatcgatcccgccaattaataagcccagaggaggcatgatgatatcggcaaccagtgaagagacaatcttcccgaatgccgcaccgataatgacacccaccgccaaatccaccacgttcccgcgcatcgcaaattcgcgaaattctttaataatgctcatgttattctccctatgaagccgacaaccataagtctaacaaatgttaagccattttcctgccaggaatgaatttaattaatccttgataatcaaagggaaataataaggcgtcattagacgccttattaattacaagaagaaagggcttggctggaagagtctttcgacgtcggtaataaactttttatctgtgaggaacataattacgtgatcgccttgctcaatgcgcagattgtcattggcaatcatcacgtcgtttccacgtaccaccgctccaataatcgttcctggcggtagcttgatttcgtcaatgactctgccgacaacgcgtgaggtgctttcatcaccgtgagcaacggcttcaatagcttctgctacgccgcggcgcaatgaggaaacaccaacaatatctgcttttcgcacatggctaagcaacgcagaaatagttgcttgttgtggtgaaatcgcaatatcgataacgctcccctgaaccagatccacataagcgcgacgctggatcaataccatcacctttttcgcacccatacgtttggcaagcatggcggacatgatattggcctcgtcatcgttggtgacggcaataaacagatcaacttgatcgatatgttcttcggccagtagttcttgatccgacgcatcaccaaaaaagacgatcgtattctgtaacttttccgccagttcggcagcgcgctgctgattacgttcgatgagtttaacgctgtaatctttttccagacgacgcgccagccctgcaccgatattaccgccaccaaccagcatgatccgcttatacggtttttccagtcgctgtaattcactcatcaccgcgcggatatgctgtgaagcggcaataaagaacacttcatcaccagcttcaacaatggtcgaaccttgcggacgaatggggcgatcgtggcggaaaattgctgccacacgagtatcgatatgtggcatatgttcgcgcatggtcgaaagtgcattaccaatcagcgggccgccataataggctttaaccacagccaggctgactttaccctcagcgaagttcaccacctgcaatgcgccgggatactcaatcagtcggtaaatattatcgataaccaactgctctggtgcgatcagatgatcaatcggcacagcatctgaatgaaatagcttatcggcatcgcgcacgtagtctggtgagcggatacgagcgatgcgattaggggtgttgaaaagtgagtaggctacctggcaggcaaccatattggtttcatctgaactggttacagcaaccagcatatcggcgtcgtcggcacctgcctcccgcaatacgcgtggatgagagccatgcccctgcacgacccgcaggtcaaatttatcctgtaaggtccgcagacgctcaccgttggtatcgacaacagtaatatcgttgttctcgccaaccaggttttccgccagtgtgccgccaacctggccggcacccagaatgataattttcatcagtcgcgacccgttatctcatcactttttgattagcttagcgtaaaagaagccgtcgccctcttcggcaccaggtagattttgtttacccggttgctctggtgttcctgtttcgcaaagttcggcatcagcggtacgttgcaaaaaggctttaatctgcaggctattctcttccggtaacaccgaacaggtggcatagaccagagttccaccggtttttaaatgcggccaaatggcgtcgagaatttcagactgcaattgcgcgagttccgggatatcgcgatcgcgacgtaaccatttaatatctggatggcgacgaatcacaccggttgctgaacaaggcgcatctaataaaatgcgatcaaactgttgctcgccacaccattgagaagggtaacggccatcaccttgtttcacggtcgccttcataccaaggcgttttaaattgtcgtaaacccgagagaggcgctgttcgtcgatatcaaccgcaacaacctgcgcttctggtgccacctcaaggatatgcgttgttttaccgccgggggcggcacaaagatccaaaatgtgttcaccgttttgtggcgcaagccaggtcatgcaaccttgtgctgatgcatcctgaacggtaacccatccgtcttcaaaaccaggtagcgcatgaacaggtgcaggtgtttccagacgtacagcatcagggtaatccgcatgcgggaaacctttcattcctgcttcatccagcaatgcaagccagctgtcgcgggaatgatgcgtacgattaatacgcagccacattggcggacgctggttattggcttcgacgatggattgccactgctctggatacgctttttgcagacgcttcagcaaccaggaaggatgcagataacgtgcatcactggcattaaactcggctaataactcttcttgctgacgctggaactggcgtaatacaccgtttatcaaccctttaagttgcggacgcttaattgcgatagcgccttcaaccgtttcagccagcgcagcatgaggtggaatgcgggtataaagcagttgatacaaaccaaccataatcaggtaatgcacggtccgctgtttgccggtcatcggacgggccattaacttattaatcagccagtctaactgcgaaagcgtacgcagtacgccaaagcacaactcttgaagaagtgctttgtctttatcggaaactttttgctggagcggtggcagaatgttgcttaatgattgcccttgctcgacgacttgttcaacggcctgggccgccatgctacgtaaattacgttgttttttcataagtataaaaacgcccggcaagaccgggcttagaagagtggactatcagaccagacggttgcccggaacaaaccattcccgacgagagttcaggaggtcttgcgcgctcatcgctttcttacccgcaggttgtaacgagagcaggttcaggatgccatcaccagtcgcaacctgaatgccttgtttgttggcttcaaggatcgttcctggtgcagcgttggttgccgtatcaatgaccgatgctttccagactttaaccggctgtccttcaatttccagccagctcattggccatggattgaaagcgcgaatgcagcgttcaagctgtgctgccgaaagtgaccagtcaatacgcgcttcttctttactcaacttctcggcgtaagtgacaagagtttcgtcctgaacttctggtttcgccgtgccgtctgccagttgtttcaacgtggtgataagcccttgtgggccaagctctgccagcttgtcgtacagcgtaccactggtatcttctgcagtaatcgggcaggagagcttatagagcatatcaccggtgtctaaaccgacatccatttgcataatggtcacaccagtttctgcatcacccgcccatagtgagcgttggattggtgcagcaccgcgccagcgtggcagcagtgaaccatgaacgttgatacagccaagacgcggcatctccagcactgctttcggcagaattaaaccataggcgacgacgaccataacatcagcctgcagttcggcgaccagttgctggttttcttgtggacgcagggaaacaggttgaaaaacgggcagacctttttcctcagccagaactttaaccgggctgggcatcagttttttaccgcgtcctgccggtcggtctggctgggtgaacacgccaacgacgttatgaccagaagacaacagcgcgtcgagatgacgcgctgcaaagtcaggtgtacccgcaaaaataatacgtagtgattctgacacgttagttcttatccttaagcccgggctttcagacgatccagtttttcaactttctgacgaatacgttgttgtttcagcggtgacagataatccataaacagtttgccgaccaggtgatccatctcatgctgaatacagatggctaacagaccgtctgcttccagttcaaatggtttaccgtcgcggtcaagggcgcgaattttaactttctctgcgcgcggcactaaagcacgttgttcagggatcgacaggcaaccttcttcaatgcctgtttcgccgcttttttctaaaagctctggattgattaacactagccgttcgtcacggttttccgaaacatcaataacaatgatacgttgatggatatcaacctgggttgccgccaggccaataccttcttctgcgtacatcgtctcgaacatatcatcgacgatacgctgaatttctgcattcacttcttctaccggtttagcaactttgcgaagccgctcgtccggaatatgtaacacttgcaaaactgacataaatctccagagatgtgttcaggagttagaaagattatttcttctattctagacaaatccccctctgattgacagcatcactgaccaatcgcaaagattgctaaggctgcttatggcagggagataaggatggtcgatacagaaatttggctgcgtttaatgagtatcagcagcttgtacggcgatgatatggtccgtatcgctcactgggtggcaaaacagtcgcatattgatgcggttgtattgcagcaaacagggcttacattgcggcaggcacaacgctttctttcatttccacgaaagagtatcgaaagctcactttgttggttggagcaacccaaccatcatttaattcctgcggacagcgaattttatcctcctcaacttctggcgacgacagattaccccggcgcactgtttgttgaaggagaactgcacgcgctgcattcatttcagcttgccgtagtggggagtcgggcgcattcatggtatggcgagcgatggggacgattattttgcgaaactctggcgacgcgtggagtgacaattacgagtggactggcgcgtggaatcgatggtgtagcgcataaagcagccttacaggtaaatggcgtcagcattgctgtattggggaatggacttaataccattcatccccgccgtcatgcccgactggctgccagtctgcttgaacaggggggcgctctcgtctcggaatttcccctcgatgttccaccccttgcttacaatttcccacgaagaaatcgcattatcagtggtctaagtaaaggtgtgctggtggtggaagcggctttgcgtagtggttcgctggtgacagcacgttgtgcgcttgagcaggggcgagaagtttttgccttgccaggtccaatagggaatccgggaagcgaagggcctcactggttaataaaacaaggtgcgattcttgtgacggaaccggaagaaattctggaaaacttgcaatttggattgcactggttgccagacgcccctgaaaattcattttattcaccagatcagcaagacgtggcattgccatttcctgagcttctggctaacgtaggagatgaggtaacacctgttgacgtcgtcgctgaacgtgccggccaacctgtgccagaggtagttactcaactactcgaactggagttagcaggatggatcgcagctgtacccggcggctatgtccgattgaggagggcatgccatgttcgacgtactaatgtatttgtttgaaacctatattcacacagaagctgagttgcgtgtggatcaagacaaacttgaacaggatcttaccgacgcaggttttgagcgagaagatatctacaatgccctgctatggctggaaaaacttgctgattatcaggaagggttggcagaaccgatgcaactggcctcggatcctctctccatgcgtatttatacaccggaagagtgtgaacgactggatgccagctgccgtgggtttctgcttttccttgagcagattcaggtgctcaaccttgaaactcgtgaaatggtgatagagcgagtgctcgcgctggataacgcagagttcgaactggatgatctgaaatgggtgatcctgatggtgttgttcaatattccgggctgcgaaaatgcgtaccagcaaatggaagaattactctttgaagtgaatgaaggtatgctgcattaatcatttctttaattcagcataagttgttatggcgaaatcagcactgttcacggtgcgtaataatgagtcctgcccaaagtgcggggctgaactggttattcgatccgggaaacacggtccgtttcttggatgctcacagtatccggcgtgtgactacgtccgtcctctgaaatcttcagcggatggacatatcgtcaaagttctggaggggcaggtttgccctgcatgtggcgcaaatctggtattacgccagggacgctttggtatgtttattggttgcattaactaccctgaatgcgaacataccgaacttatcgataaaccggacgaaacagcaattacatgcccccaatgtcggacgggccatctggtccagcgccgctcccgttatggcaaaacatttcactcttgtgatcgctacccggagtgtcaatttgccattaacttcaaacccatagctggagaatgccctgagtgtcattatccgctactcatcgaaaagaaaaccgcgcagggtgtaaaacacttttgtgccagtaaacaatgtggaaagccggtttcggcggaataataacgtgaataataacctgcaaagagacgctatcgcagctgcgatagatgttctcaatgaagaacgtgtcatcgcctatccaacggaagccgttttcggtgttgggtgcgatcctgatagcgaaacagcagtgatgcgactgttggagttaaaacagcgtccggttgataaggggctgattttaatcgcagcaaattacgagcagcttaaaccctatattgatgacaccatgttgactgacgtgcagcgtgaaaccattttttcccgctggccaggtcctgtcacctttgtctttcccgcgcctgcgacaacaccgcgctggttgacgggccgctttgattcgcttgctgtacgagtcaccgaccatccgttggtggttgctttgtgccaggcttatggtaaaccgctggtttctaccagtgccaacttgagtggattgccaccttgtcgaacagtagacgaagttcgcgcacaatttggcgcggcgttcccggttgtgcctggtgaaacgggggggcgtttaaatccttcagaaatccgcgatgccctgacgggtgaactgtttcgacaggggtaacataatggaaacctatgctgtttttggtaatccgatagcccacagcaaatcgccattcattcatcagcaatttgctcagcaactgaatattgaacatccctatgggcgcgtgttggcacccatcaatgatttcatcaacacactgaacgctttctttagtgctggtggtaaaggtgcgaatgtgacggtgccttttaaagaagaggcttttgccagagcggatgagcttactgaacgggcagcgttggctggtgctgttaataccctcatgcggttagaagatggacgcctgctgggtgacaataccgatggtgtaggcttgttaagcgatctggaacgtctgtcttttatccgccctggtttacgtattctgcttatcggcgctggtggagcatctcgcggcgtactactgccactcctttccctggactgtgcggtgacaataactaatcggacggtatcccgcgcggaagagttggctaaattgtttgcgcacactggcagtattcaggcgttgagtatggacgaactggaaggtcatgagtttgatctcattattaatgcaacatccagtggcatcagtggtgatattccggcgatcccgtcatcgctcattcatccaggcatttattgctatgacatgttctatcagaaaggaaaaactccttttctggcatggtgtgagcagcgaggctcaaagcgtaatgctgatggtttaggaatgctggtggcacaggcggctcatgcctttcttctctggcacggtgttctgcctgacgtagaaccagttataaagcaattgcaggaggaattgtccgcgtgaatcaggccatccagtttccggacagggaagagtgggacgagaataaaaaatgtgtatgttttcccgctctcgtgaatggtatgcaactgacatgcgcgatctctggcgagagtctggcgtatcgctttactggagatacgccagaacagtggttagcgagttttcgtcagcatcgctgggacctggaagaagaagcggaaaacttaattcaggaacaaagtgaagatgatcaaggctgggtctggttaccctgatccagatattcgtccttccatttcacgtaattattcgcggaatagcgtaacccagccttctcttcatcacttaacgggcggatctgtttgacggggctaccgagatacagatatccgctctccagccgtttattttgtgggaccagactacccgcaccaatcatcacatcatcttctactattgcgccatcaagtaaaattgagcccatcccaaccaaaactcgattgccaatggtgcagccgtggagcatcaccttgtgaccaacagtgacatcttcgccaatggttaatgggttgccatctgggttgtacgaggatttatgagtgacatgcaacatactgccatcctggatattggtgcgtgctccgatctgtacataatgtacatctccacgaatcacaacgagcggccagatccccacatcatcagccagacgaacgtcaccaatcacgacactgctatcgtcgatcattacgcgctgaccgatttgtggaaaaagatcgcggtatgggcgtaaaacatcagacatacttacctcagcaataaatgatttactaatgactttgggggcattattggccttgtgcaagtcttttagtatgcaaaaaagcaccgttttgtgtgcgattgcagcaaaaagggtgaaaaaacaacaaacagaaaaaaagatcaaaaaaatacttgtgcaaaaaattgggatccctataatgcgcctccgttgagacgacaacgtgaaacacttcacaggatggtcggaacaacgaagagaaaaaaatcctgaaattcagggttgactctgaaagaggaaagcgtaatatacgccacctcgcgacagtgaactgaaagccgcgtcgcaactgctctttaacaatttatcagacaatctgtgtgggcactcgaagatacggattacaaagcctccctgaaatatctcagcgatcacccgaaactgcagggtattgcccagcagaacagctttaaacacacctgataacataacgttgtaaaaaccgaatgcccagcctttaaaaaaacagctgggcattcggttgcttattaatcgcaataatatattggctgtctattcatcgtgttgataagatatatgttatatgaatgtttattaaatgtagcgattacctttaatgtcacgaaaagggattatttgcttactattaatttccctgcgttcttaaacacgtttttgtattataaatccagtcatcctgcccgtagaacatcacacattatcatcctgttctcccgcttcgtttaaatttatttatcaatcaatttgacttaagagggcggcgtgctacattaataaacagtaatatgtttatgtaatattaagtcaactatgcaatcactacatgggaattgtctaattgcgtatgcaagacataaatatattctcaccatggttaatggtgaatatcgctattttaatggcggtgacctggtttttgcggatgcaagccaaattcgagtagataagtgtgttgaaaattttgtattcgtgtcaagggacacgctttcattatttctcccgatgctcaaggaggaggcattaaatcttcatgcacataaaaaagtttcttcattactcgttcatcactgtagtagagatattcctgtttttcaggaagttgcgcaactatcgcagaataagaatcttcgctatgcagaaatgctacgtaaaagagcattaatctttgcgttgttatctgtttttcttgaggatgagcactttataccgctgcttctgaacgttttacaaccgaacatgcgaacacgagtttgtacggttatcaataataatatcgcccatgagtggacactagcccgaatcgccagcgagctgttgatgagtccaagtctgttaaagaaaaaattgcgcgaagaagagacatcatattcacagttgcttactgagtgtagaatgcaacgtgctttgcaacttattgttatacatggtttttcaattaagcgagttgcagtatcctgtggatatcacagcgtgtcgtatttcatttacgtctttcgaaattattatgggatgacgcccacagagtatcaggagcgatcggcgcagagattgtcgaaccgtgactcggcggcaagtattgttgcgcaagggaatttttacggcactgaccgttctgcggaaggaataagattatagagttttactcagacataaaaaaaacccggcataggggaccgggaagaggatagtctgccgtctccagactaataaaccgttataacactccctgttggcacgggaaactttgtgctctcagtaagttaaatataacttttactggaaataagatcagccatttttttataaacataagctatacgctgtgcgaaaatatattcgtgctgcatttacttattatcaattaactgttatgcaaaactactttgtggataaattttggtcctaccaaatctggcagtttttgcgctaagaaacagtctggcatcatttcattagtatactgaaattgaaataatcgcagtatgaaatataagggataatcatgactcatgtctgctcggtgatcctcattcgtcgttcattcgatatttatcatgaacagcaaaaaatatcgctgcataacgagagtattctgctgctggagaaaaatttggcagacgattttgcgttttgttcaccggatacgcgacgactggatatcgatgagctgacagtttgccattacttacaaaatattcgtcagctaccacgcaatttagggttacacagcaaagaccgtttgttaattaaccagtcaccccccatgccgctggtgacggcgatttttgatagcttcaatgaatccggggtaaattcaccgatactgagcaatatgctctacctttcctgtttatcgatgttttctcataagaaagaactgatccccttacttttcaatagcatcagcactgtttcaggaaaagttgaacgccttattagctttgatatcgccaaacgttggtatctgcgcgatatcgcggaaagaatgtataccagcgagagtctaatcaaaaaaaagttgcaggatgaaaatacctgtttcagtaaaatattactcgcctccaggatgtcgatggccagacgattactcgagttacgtcaaattcctctgcatactattgcggaaaaatgtggctatagcagtacatcgtactttataaacacatttcgacaatattatggtgtaacgccacatcagtttgcgcaacattcgccaggtaccttttcctgacatatttcgcatttgaatattggtcaggatctcacacctgcttcatgtgaaactcttccctgatgatttctgccgggctaccggctagttctctttcgcagtttgccaggcggtatcggtattttcaggaggaaaagactcggcatgtttgggattattaagctgacaattcatacgattacgggaatgtgggtcagtattgtgttgttcaaattgatgacgaatggctggagtggtttctactttcagtgctgtgtactaagcctggtattcctgacggttagctggttgttgagtggtgaatggttagcaggaaagagtaaggctgaaccttcatgttcaaccttactctcatttacacgttacgcttttttaaagcgggcaaagagatgttccactacaacgaaaaagaccggaacgaagtaaattgccagcactgttgcggcaaacatcccgcccatcacgccggtacctaccgcgttttgcgcgccagaaccggcaccatgactgataaccagcggcagcacgccgagaataaaggccagagaggtcatcaggattgggcgtaaacgcatccgcgccgcttcgatgattgcctctatcggcgttttcccttctttctgcatcatctcaacggcaaattcgacaatcaggatggcgtttttggcggaaagcccgatggtggtcagcaaaccaacctggaagtagacgtcattacttaagccgcgcagatcggtggccagtaatgcgccaacgacgcctaacggaacaaccaacatcaccgagaacggaattgaccagctctcatagagtgcggcgagggcgaggaacaccacgaccagtgaaatcgcatacagcgcaggagcctgatttgaggataacgcttcctgatacgatagtccggtccatgagtagccgacgcctgccggaagtttagcgaccaggtctgccataaatttcatggcgtcaccggtacttttcccggccgccgcttcacctaaaatctccattgacgggatgccgttgtagcgttccagtcgcggtgaaccataggtccattcggtagacgagtaggcagaaagcggtgccatcgtgccagaggcgttgcgtacataccattggttgatgttatccggcaacatacggaacggcgtgcctgcctggacatacacttttttcacccgcccctggttgaggaagtcgttcacgtagctgctgccgaaggcggtggaaattgtctggttgatatcagacagcgccacgcccatcgcttcagctttcgcagcgttgacgttcactttgaacatcggcgtatcttccaggccgttcgggcgtaccccggtgacctgattcggtgattgcgctgccagtgataacagctcgtttcgcgcctgggttagtttttcgtgccccaggttaccgttgtccagcagttccatatcaaaacctgacgcggtacccagttcagccaccgcgggtaagttgaacgggaagacgacggctttattgatactgcttaacgcaatcattgcccgctgaatgatcgcggtaaccgagttttcctcaccgacacgttcagaccacggcttgagactgataaacgccaggccgttgttttgcccctgaccgctgaagccaaagccgccaacggtaaacaccgactggacattatctttctctttagtcagataataatccgtcacctgttgcagcactttcgtggtgttaaccatggtggcaccggaaggtaactgcgcggtggtcataaataccccctgatcctcttctggtaagaaagaggtcggcgtgcgcaggaacagcaccgccatcccggcgcaaatcagcaggtagaccaccatgtagcgaccggtacaacgcaacagcgagcgggtgctatcggtatagtgttgagttgatttttcaaacagcgtgttgaagcgtgcgaacagggcgttaggtttgtgaccgccttccggcgcggctttcagaatggtggcgcacagggcaggggtcaggctcattgccacaaatactgaaagcagcatggaggagatcagcgtgatggagaactggcggtagatctccccggttgcaccgctcataaaggccatcggcataaacactgcggaaagaacaacggcaataccgaccagcgcacgttggatctgccccatcgatttatgcgtcgcttccttcggcggtagcttatcttccgcaatgacacgctcgacgttctccaccaccacgatggcgtcatccaccagtaaccctatcgccagcaccatcccgaacatagtcaacgtgttgatggtgaaaccgaccgccgacaagatcgcaaacgtcccgagaataaccaccggtacggcaatcgtcgggatgattgtggcacggaaattctgcaaaaacagatacatgaccaggaagactaggatgatagcctcaaccagtgttttgaaaacttcctgaatagaaatttcgataaacggcgtggtgtcgtaaggataaaccgtcttcagacttgccgggaaataggctgataagcggttcagttcctctttgactgcccgcgaggtatccagggcgtttgctccggcagccagtttgatggcgatcccggcagcaggtttgccgttatagcgcgccacggtggaataatcttccgccccaagttcgacgcgagcgacatcacgcagcagcacttgcgaaccatcttgctgaactttcaacaggattttgccaaattcttccggcgtttgcagacgcgtctgcacaatgatcgaggcgtttagctgctggtctgccgcctgtggcatgccacccagttgaccaccggaaatctggttgttttgcaccttaatctgggaaataacatcggaaggtaccaggttatatttattgagtttttgcgggtccagccagatacgcatggcatactcggaaccaaagagttgtacgctaccaacgcccgcggtacggcttagcgggtctttgatattagacgctacatagtccgcgatatcgtactggttgaggctgccgttatcagaaataaacgccgctaccatcaggatattactgctcgacttatcgacgctaatcccctgctgctgcactgcttcaggtaatgaaggcatagcgagttgcagtttattttgcacttgaacctgtgcgatatcaggagatgtcccagtctcgaaggtcagagtgatagaggcattgcccgccgcatcactggttgaagacatgtacatcaggccatcaagcccattcatattttgctcaatcacctgagtgaccgagtcttctaccgtttgcgcatcggcacctggataggtagcgctgacggtaatggtcggtggcgcaatctgcggatactgcgcaaccggtaagttcatgatcgccagaccacctgcaagcatcataataatggcaagtacccaggcaaaaaccgggcgatcaataaaatagttagccatgaaagtccccttaagcctgcaacgttattgtttcgattcggtgctggcgttttcctggctggaggaaattgctcgtgctttgatacccggacgaatgcgttgcaaaccggaaacgatcacccgatcgccagcctgcaagccagaggtgacgacccactggtcgccgatggctttgctggcttcaatttcgcgtagctgcacgacatcgtctttatccagaatgagcgccgttgctttaccctgggcgttgtgggtgacgccttcctgcggcaccagtaatacattctggcggctaccttcatccactaatgccgtgacgtacatgccaggcagcaagtcaccatttgggttggggaaaatcgcccgtaacgtcacggagcccgtggtttcatccactgtcgggtcggagaatttcagcgtgccggtctggctgtagcgtttaccattttccagattgagctgtactggcgtactgccctgaacctgtttgatttgcccactggcgacctcttctttcatgcgtaagaaatcttgcaccgactgcgtgagatcgacataaatcgggtccagacgttgtacggtaaccagcgaatctgcctgattagcggtaacgagtgcgccgacggtcaccgacgatttcccgctgacgcccgtaatcggcgaggtgacattcgcgtattgcagattgatcatcgcctgttcaacagccgctttggcgacggtgacattggcttctgcttcattcaactgggtgcgcgcggtgtcgtaatcctgacggctaacgtagttggtcttcagcaacgatgcctggcggttaaaggtgatgcgggcattgctggcggtagagagcgctttcgccagcgagcctttggcggagtttagctcggcctgtaaaggtgcaggatcaatctgatacagcgaatcgccctggttcactttatcgccttcgataaagttgcgtttaatgataataccgcccacctggggacgtatctcggcaacttcataaggaacggttctaccgggcaattcgctcaacacattgaccgaaccgggggagagtgtgacgacaccgacctcaggcgtcatggcggcggcgttttccgccgatttgtcatcgcaggcggtgagcatcgcgccgcagaataacaacggtattaacagctttcttcttctgttcattttagtccctgaaaattcttgagaaataacggttctttaaattgcgcgcgaggagagatatgagggatttacagaccagcggcatagtggggttgtcagccagtaaggtgggatacaggcacagtgatcgacatggtgaggtcaacgacaaaaaaaatgttgccgttctgccaacagttcctgccagcattcgggcaacgaagggttctactggtggatacacataccaggggaataaagtcgttttagcctctcctttagtaatcaccgggggtaatgaaatcagcatctgcatccctcgtcatgccagccatcaatttcagttgcttatgtcctgactaaaaataagatgtgatacccagggtgacgatgtcgctcatacgtcttagtttcagcttgtacataatgttgaatttctgaatctttaatgtttgttgcgaaatattgagcgtcgacgtgatattgctttcatttttatttttcagaatcagttgcataattttgaactgattatgtgaaaaacataattgtgaattcttatggggcaagtgtttaccataagtaatctcaagaagatttttgatactttctttgcggctaacaaaataaataggcgctttagcttttagtttactgatgtgataaggtgccaaaacaataattctctcggcatctaatttctccagaaatttaatcgcttcttcatcaaggatatgattgtgataggtatcaatgataaccttgaagggtttattgcctacttttttgatctctgacagggaattgatttttatcatttcgtgattatctttcaactgccaaaagccctgtaaaagaaaagaatctttcgtcatgagaaaaatcataacttgctccttagccgttatcgtttcgaatatgtcatccttttcattatttacatccttgtccgaatcgttgttcaatatagtaaacgcctataagaactttacccttcgtgaactaatacgtctattaacactaatcaatacttcagatttatccatcacgcactccatatattgatcctaagtaagattcctggttgttatcagcttgtaaatagcaaacaaaaagttaacgtttgcggattactgcccaagaataagttatcaataaccagtttgtgatctctgaagaatattactaaagttaaaatgtaatccgatttaaatatcgagtctccttgtttcgacttaagctggcaattggattgccagctttcttttaacgcattgaaattacctgagtaaataacgcattcatgtcttcaggtttttatatagcgtctggagacacggatatttatgcaatgtaatcaacgccagttgcaaaaaaatgaacccggattacttatttaaccgcccatagcatcaacgcttacggaactctttgttcactttcccacagcacttttaaaacattaaacctgactacggaaaatatcagccatgataatgtttgaaatggctaatttgccatagagtgaaaaaaattagatgaaattcagtaggttgaaataatcactagcaggtaattatttcaatgatagtgcgcaattgatctacaacactgcgtagcggagagagtattaatcggatcatagtcacatcaagtgactatgatccgggtgacaaccggggtaattattgctgcttaacgaacaaactggcgaagctgaacaggctggcggcgctaaatatcagttcaattcccaccagtgtggaaaccagcgttacagacaccatcggcgttgcaccaaggaatatccaggcaatgacgatatccagcacaccaataacgagctgtagccagctgcctttcattgaacgctgacgataccaactcatcaggcgaataacccctgcaacacagaacaaaccggcaataaatgccgcaatggcaaaaatgcccagctccggtgcgcggatgaagaaatagccgatcaataaataggcgactgcgacgaggaaaccggataataccggccagaaattatgactgcggttgctgaataacccgacaataagcgcaatacccgagcagattaataatgcacccactactgtgcttaaaatatcgccagagacgaacgggaaactgatacacagcaacccgacgataaacagcagcacggcaataaactggattgctctgcgatgttttttaagcatctccagatcaaacttcaaaattgttgccttatctatatataacatagaaccaccctataaaattaagaagaaaatcccctgctatcaatctatgccaaaaacgcgtctaagaatgcagtcgatttaataaaaatttcctaattgcagtatctgatgcatctgtaactcattgtattgaaataaaaatatctgattttgatattttccatcaacatgacatatacagaaaaccaggttataacctcagtgtcgaaattgattcgtgacggctctttcactttatagttgaggatattacgatgaaaaaagtattaggcgttattcttggtggtctgcttcttctgccagttgtgagcaatgcagcggatgcgcaaaaagcaactgataacaaaaaaccggtcaactcctggacctgtgaagatttcctggctgtggacgaatccttccagccaactgcagttggttttgctgaagcgctgaacaacaaagataaaccagaagatgcggttttagatgttcagggtattgcaaccgtaaccccagctatcgttcaggcttgtactcaggataaacaagccaactttaaagataaagttaaaggcgaatgggacaaaattaagaaagatatgtaattccgggaatgcgttacatcgtacttccttgcatattgaacaggccggaatatcttctttaaaagcagctattcctcctgttcatatataatctctatattgaatgggttacaaaatgaatatttcatctctccgtaaagcgtttatttttatgggcgctgtagcggctttgtcactggtgaacgcacaatctgcgctggcagccaatgaatccgctaaagatatgacctgccaggaatttattgatctgaatccaaaagcaatgaccccggttgcatggtggatgctgcatgaagaaacagtatataaaggtggcgataccgttactttaaatgaaaccgatctcactcaaattcctaaagtgatcgaatactgtaagaaaaacccgcagaaaaatttgtataccttcaaaaatcaagcatctaatgacttgccgaattaatgaggtgcaagtaaaaaggagtagcaagttgagccatcttgctgctcctttttgcatttttatatgacagcagaatttattatacgtcttatactcgcggcaattgcctgtggcgctattggcatggaaaggcaaatgcgcggcaaaggagcagggttacgcacacatgtattaattggcatgggaagcgccctgtttatgattgtttcgaaatatggttttgctgacgtgctgtctttagatcacgtcggactcgaccccagccgtattgctgctcaggtggtgacgggcgtcgggtttatcggtgcaggtaacattctcgttcgtaaccaaaatattgtaggtctgacgacggcagcggatatctgggtgaccgccgccataggtatggttattggcagcggtatgtacgaactgggtatttatggttcagtgatgaccttgttggtgctggaagtcttccatcaattaaccttccgcctgatgaacaaaaattaccatttacagctgacattagtgaacggtaatacggtatcaatgctcgactggtttaagcagcaaaaaataaaaactgatttagtttcgttgcaggaaaatgaagatcatgaagtggtcgccattgatatccagcttcatgccacaacgtcgatagaagacctgttgcgattattaaaaggtatggcaggggtgaaaggcgtttcaattagctaatctgtgtggcagcgtagccagactcaccgtaagcctgaaattcacaccagataatcaatatgctgatggcgtaccagctcattgatccgcttaagattgaggatcatcatgatattgtgtttatggcagtagaacgtttttagcgatattttcagtttctccagaatatcttccgttgtcatttgattcgcaatgcagctcagaacctgatgttgcttgcgcgaaagtgacacagccgcttcaggcacagagcagtaactgccattgatgagtgcgacaaaatcaatgatagtgatagtccgcggaacaaaggtcaccggcactttccccaggcagcgtttaatattaaagggggagaaaataatgacatggacaggttttaatcgttcaatttgagtgagaaaattagaatgaaatacattattcattaatgtatcaataatgacgaaggcattctgatgcaacattacgtcgatctcttcttcgttctgtatatgaacgacattacctttactcagaatgtttttcatcgcggtgaagaacatcgtatccctggtaattataagaaacataaccgactcctggtgcggacattaactttataatcagtttgccaaaggtaattaacaggacagggcttataataataatagttagcttactgtgtattaatttgatgtaatgcatgatgcagatgctgagaaagcatctgcatctttcggtggtgttatttgaccagctcaggtgttacctgactcaccgcattggtgtagtaaggcgcaccccagcccggttccggccagaatgcaccatagccgtaatcccacaggttataggtggtattaaccacttctctcaaatgccacacctggatgccctgcatattcacttccaggaagttatacgggactttattgataaagccaggttgttcaccctgaatggtgccgaggatggtaacaaagtgattacgatagttcactggatcaaggaagccgctttgtctggcgagcagtcggccctgatagttggcttcaatatcaggcttcgcatagctatccaacggtaatacagcgatttctaacaacgtatccgttttgccattgataacgttgataaccttcccaccaaagcgcgcttgttgaccaacatataaccccggctggttatgaacagcaacaaaacttttttgaatatcaggttggttattgcctttgatattttgcggaattgaactacatgcggcaagcaaaaatgaaaggctgaggatgagtgcaccttttgtcatgttcatgttactatccttatcaacaaatattaaaaccataatagatatttctttatagttttcatctgattctgaggtgatatgcctgatagtaacgtaaacctgtctgatgtttatatcctttctgtttaggtgaactcagttaattttggggcgtgacatgaatatccatcaccccataatatagtgcattgttttaaaagtacataaaatctatttttattcaatgattataaagtgctaataatcaatattatggtattatattctggtaatgatttgataagcgaattcttttaccagatggtatttctatttccaccccataatttatatctttttcattaggcagtggcctctttaaataaggcgtgtgtgacattttttttgggttaagcgtctcgtattgaaatacttcgaattgatattcagacatttctgcccatgtttgaattttattgtatcgggagagtgtcgtaaaggctttaacttgcttataacattgtttttggaattcttgctgatattttaatatgtcattgtatgaaagattggttatcctggcctctaaaaatttaattattgtcgaagcaatttccgcttttgctcgtaaaaggttgtcattaatggttaataatgttgaaaataaaccttcgatttgtttgtcaagatattgtccatctttatataatttgggggtagggtgttctttatgtaaaaaaatagtgtcacctaaatttgcgtcagtgaaatttatattaagtagatcttcgaaataaaaccttgacaaggttagaacgaacccggacaggttctgtcctgtcatattgaaatcaataaagttggttccggcaaagactttcatcctgtttttattttcactgtgctcaatatataacttcgtcattttttgatacaggctttgaatatcttttatattagttggtaagtcagctcgttgttcagcaataaaattagtatctgaaaacatggtttggacactgaatgttatgggtattccctcttctacgctaattttagttatgattgccttgtcgggtttaggattagcgataacaatgattcgacattcagcacttttgtttttttcatatctaatgttattaatctgattaagtattgattgtgtctgttgcgtaagttgtgtcgaacttatcgtttcaatgttagtaataagacttacaagttgagccacaacttttgagtagtctgcatttgtatatgtagtgttcgtgtggcacgcattaatttgttgaagttggtgttgcgctaaatcatattgatcagagatatatccttctccagagaatgtggaattaatgggttgttgttcttcccaattatcgcaaggccacttcggtgtgtctggcgttttagcattatcggtatttgttgtgcagttataaatatcgccgtgatatgtatttattatacctggggtaaagtcaattgacataaaattccttattcatcatttgttttatgctaagatgtttaaattggataattagaacaggaatggattttcttctacacacaataaatgtaatgcgttatatcttcctgatataattacctttgatttcccttttatctccacccggtaatatttgtgtgtaaaaaaagggtagtgatagtatcgtaaaggaaatcgttaacaactatcaaaatgcgctcattttaaaaagttattatgttctctgatagtgtgtgaagtgattttttttgtgatgttttagatgtgtaataataaaatgggttaaggtatcttataattatttaataatttgttgtgtaaaccactgataaatcataatccagtacgtctttaaactactgcgctgtatcgctgataactaagcagctcactgatacaccatgctggacgcgataattggaatctcacgcagggagtactgtgtaaatagcaaaatcgcctgatgcgctacgcctgtcaggcctacaaataacatactattcatcgaattttcataactttgtaggtcggataagacgcgccagcgtcgcatccgacataaataaagcgcacttttctaacaacctgtgggggggatatcgccgctttatttcaggcgcttacccgcttcatcaaccactttctcgccatcttccttggagaatgcgcctttttgcgcatctggcagaatttccagcaccacttctgaagggcggcacaggcgagttcccagcggcgtcaccacaatcgggcgattaatcagaatcgggtgctgaagcataaagtcgattaaccgatcgtcagtaaatttatcttccgcaaggcccagctcctcatacggttcgacgtttttacgcagcagcgcgcgtacggaaatccccatatcggcaatgagtttgaccagttcatcgcgcgttggcggagtttccagataatggataatggtcggttctgtgccgctgttgcggatcatctccagcgtattacgcgacgtgccgcaggccgggttgtgataaatggtaatgttgctcatatcagtatctcattacaaagtgaaagagagacgtagcgccagcgcagccagcgtcacaaacagcacaggcagggtcatgataatccctgtacggaagtaatatccccagctgatagtcatattcttctgcgaaagtacgtgcagccagagtagcgtagccaggctaccaattggggtaattttcggtcccaaatcgcagccaatcacattggcataaaccatcgcttctttgataacgccagatgccgtgctgccatcaatggacaacgcgccaaccagtaccgtcggcatattgttcataatagaagagaggaaggcggtgaggaatccggtgccgagcgtcgcggcccacaggccgttatccgccagcacgttgagtacgccagaaagatattccgttaatccggcattgcgcaggccataaaccaccagatacatgccgagcgagaagatgacaatctgccagggggcaccgcgcaggactttacccgtattaatcgcatgaccgcgtttagcgacgacaaataatatcagcgcgcccacagctgcaatggcgctcaccggaatgccgagcggttccaggacgaaaaatcccaccagcagaagcagtaaaacaacccagccagttttgaacgtagcaggatctttgatcgcttctgcgggagatttcagcagcgccatatcgtagttctgcggaatatctttgcgaaaatagagatgtaacatcaccagcgtggcaacaatcgcggcgatatccaccggcaccatcaccgaggcgtattcgcgaaagccgaggccaaagaaatcagcggaaacgatattcaccaggttggagacaataagcggcaggctggcggtatcggcaatgaatccggccgccatcacgaacgccagcgtagtgcctttactgaaccctaaagccagcagcatggcgatgacaatcggtgtcaaaataagcgccgcgccatcattggcaaacagggcggcaacggcagcaccgagcaggacaatccaggtaaacagcaagcgaccacgaccattaccccagcgtgagacgtgcagcgccgcccattcaaaaaagccggactcatccagcagcaggctgatgataatgacggcgataaacgcagccgtcgcgttccagacgatattccacaccaccggaatatcacccggatggaccacgcccgtaactaacgccagtactgcgccgagcgttgcactccagccgatgcctaaacctttcggctgccagataaccaatacgatggtcaggacaaagatagcgcctgccagtaacataatgcctcccggataaaacacatctgaaaattcatatgtgtttagctaaatttttaactgcaaatgttcttactgtccccggaacagttttgtcgagccaggttgcggacaatcgcctgaaccttttcctgttcacatcgccaggcctcatcaataattttcgccgcccatgctggaatatgcggtgataagcggtaatgaacccacttaccttgcttgcggtccagcaatagcccgctttcacgcagcaatgccaggtggcgggagatcttgggctgcgactggtcgagagcagtgcagagatcgcagacgcataactctcccagttcgctgagcagtaaaacgatgcccagacgggtttcatcagcaagaattttgaacaattggatgggtaacagaaatgacatattgcgctcctgattgttgcaggtagtgtctctcttcgaagcggataagtcaaaaacatatatgacttaacgaatgtgtaagtgcagaggaaggtaataggtgtgaattttgagttggctattcatttgaaaggaggtctgaatcaggacgtaaaaaaaccgactttgcgtcggttttttactttccagccctgagttggtggctctggctggagtgagagagttcttatctaacagctcaatactattagccagtggctaacattgcaagaattagcgatttcttcagctggcggagggagcacttcggtatatatcgcagtgacgatttatatactttcactgggtcatcgtcatattaagccttgtccgaatccggatgtaaaaaaaccgactttgcgtcggttttttactttccagccctgagttggtggctctgactggagtgagatagccatcatctaacgcatcaatgctaataccatactgaaactattgcaaggacgtgctggttttataacctgcatgtactgtatgattatccagttagctctgaggcattttcactctggcaatgcgcataaacgctttcaaagtcctggtcagaagtacgggtggtgccgttaactgatgctctggccggagtgagagagttcttatctaacaatgagacatgcgccgtgacaggcagtggatgagtaagcggatgcattctcactccatcgcatggagaaaacgggtgattgataaagcaatcatcgttctaggggcgttaattgcgctgctggaactgatccgctttctgcttcagcttctgaactgatagcggaaacgtaattaagggctaagagcacactactcttagccctttaacatttaacgcattgtcacgaactcttctgccgccgttgggtgaatggcgacggtattgtcgaagtcttttttggttgcccccatcttcagcgccaccgcgaagccctgcaacatttcgtccataccaaagccaatgccgtgaataccgacaatcttctcttccgatccaacgcacaccagcttcatgcggcacggctggcggtgagtggtgacggcggtatacatcgcggtgaaagaggatttatacactttcacctgatcgtcgccatactgctcgcgcgcctgcggttccgttaaaccaacagtaccaatcggcggatggctgaagaccacggtcggaatgttgctgtaatccagatgctcatccggcttgttattaaacaggcgttcagagagacggcgacccgctgcaactgccaccggtgtcagctccactgcacccgtgttatcgcccaccgcgtaaataccttcaatattggtgttttgatatttatcgacgacgatatagcctttttcgttagttttaacgccagcggcttccaggttgatgttgtcattggcaggctcgcgaccaatcgcccaaatcaggcaatccaccgtttcactgcgaccatcttccagctccagcgtcaggctaccatcggcatttttcactaccgctttcgggatggcgttggtgtgcagctgcgggccttcggcgttcatcacttcgaccagcgtttcggaaatcatcgggtcgaagctgcgcagcggcgcatgtttacgcacaaacagatgcgttttcgcgccgaggccgttaatcacgcccgccagctcaacggcgatgtaacccgcgccaacaaccgccacgcgctctggcaaagcaggaagggcgaagaagccatcagaatcaataccgtattccacgcccggaatatccgggtggctcggacgaccgcctgtggcgatcagaatatgatcggccgtgatggtttcgccgtttacctccagcgttttggcatcaacgaagcgggcaaagcctttgattacatcaacgttatttttaccgagcacgttttcataggaagtatgaatacggtcgatataggcggtacggctggcgatcaacgtttcccagttgaatttattgatagtggtatcaaaaccataatccgggccgtacatatggatcgcttcacggatttgcgccgcgtgccacatcacttttttcggcacacagccaacatttacgcaggtgccgcccagctctttggcttcaatcagcgcacatttctggccgtacatagccgcgcggttgatggaggcgataccgccgctgccgccgccgatggcgatgtaatcatagtgtttagtcatgacaaagtgtccttatcgttgattaccgcgattgtagcgcgagacgtaataggtgccagcaatggctgcaattactccggcacgatccagcttacggtggcgtgcccggtgcctgccggaaccagtttgctgtgcagccacggcagcacgttattcatctgttgttccagtttccacggcgggttaatcacaatcatgccggaagcggtcatgccacggcgatcgctgtctggcagtaccgccagttcaatttgcagaattttgcgaataccggtcgcttccagatcgtggatcatgcgcttaatttgctgacgcagcaccaccggataccacagtgcgtaaataccagtggcgaaacgtttgtaaccttctgctatcccgctgaccaccgcttgatagtcagttttcatttcatacggcgggtcgataaggattaaaccacggcgggaaaccggcggcagtttggccttaagctgctggaaaccgtcggctttttcgacacgcgcacggctatctttctgaaattcagaacgcaacaacgggtaatcgctcgggtgcagttcggtcagttgcaggctgtcctgttcacgcagtagcaggcgagcaatcaacggcgaaccggggtagtaacgcaactgaccgctacggttgaagtgttttaccacattgatgtacgcctccagttctgcgggcaaatcgtcctgctgccagatacgggcgatgccttcgagatattcgccggtacgctcggcatgttcgctgcctaactgataacgcccggcccctgcgtgggtgtcgagatagagaaacggtttatctttctctttcagcgactcgatgatcaggctctgaacggtatgtttaaggacgtcggcgtggttgccagcgtgaaagctgtggcgataactgagcatgggtaaaggtgttccggtaagtaaaaatcggcccgtattcggggcgcacaaaagcgtatcaggacagtataccgaaaagaggccgccgccgcgaaagcgtaacgtttctcattgaaattcactacacttaaccccatgctacacacattatgtaaagcgcctgttgagcgcttccttaacctctttaaccaggactgcgcgaatgacgaatccgttactgactccctttgaattgcctccgttttctaaaattctcccggaacatgtcgttccagccgtgactaaggcattgaacgactgccgcgaaaacgtggagcgcgtagtagcgcaaggggcaccgtacacctgggaaaatctctgccagccgctggcggaagtggacgatgtgttggggcgtatcttctccccggtcagccacctgaactcggtgaaaaatagcccggaactgcgtgaagcctacgaacaaaccctgccgctgctgtcggaatacagcacctgggtagggcaacatgaagggctgtataaagcgtatcgcgacctgcgcgatggcgatcattacgccacgctgaacacggcgcagaagaaagcggttgataacgcactgcgcgactttgaactctctggcataggtctgccgaaagagaaacagcagcgttacggcgaaattgcgacccgtctttctgaactgggcaaccagtacagcaacaacgtcctcgatgcgacaatgggctggaccaaactcgttaccgacgaagcggagctggcggggatgccagaaagcgcgctggctgcggcaaaagcccaggccgaagcgaaagagctggaaggttatttgctgacgctggatatcccaagctacttgccggtaatgacctactgcgacaaccaggctctgcgtgaagagatgtatcgcgcttacagcacccgcgcctccgatcaaggcccaaacgccggtaaatgggataacagcaaggtgatggaagagatcctcgcgctgcgtcacgaactggcgcaactgctgggctttgaaaactacgcctttaaatcccttgccactaaaatggcagaaaacccgcagcaggtgctggatttcttaaccgatctggcaaaacgcgcgcgtccacaaggcgaaaaagagctggcgcaattgcgtgcctttgccaaagccgaatttggcgtcgatgagttgcagccgtgggatatcgcttactacagcgaaaaacaaaaacagcacctctacagcatcagtgacgaacagctgcgtccgtacttcccggaaaacaaagcggttaacggcctgtttgaagtggttaagcgtatttacggcatcaccgctaaagagcgtaaagatgttgatgtctggcatccggatgtacgtttcttcgaactgtatgacgaaaataacgaactgcgcggtagcttctacctcgatctgtatgcccgtgaaaacaagcgcggcggggcgtggatggatgactgcgtaggccagatgcgtaaagctgatggttctttgcaaaaaccggtcgcgtatttgacttgtaacttcaaccgcccggtaaatggtaaaccggcgctgttcactcacgacgaagtgatcaccctcttccacgagttcggtcacggcctgcaccatatgctgacccgcatcgaaaccgctggtgtttccggtatcagcggtgtgccgtgggatgcggtcgaactgccgagtcagtttatggaaaactggtgctgggagccggaggcgctggcgtttatctctggtcactatgaaaccggcgaaccgctgccgaaagagttgctggataaaatgctggcggcgaagaactaccaggcggcgctgtttattctgcgtcagctggagttcggcctgtttgatttccgccttcatgccgagttccgcccggatcagggggcaaaaatcctcgaaactctggcagaaatcaagaaactggttgccgtggtgccatctccgtcctggggccgtttcccgcacgctttcagccatattttcgccggtggttatgccgcaggttactacagctacctgtgggctgacgtactggcggcagatgctttctcgcgctttgaggaagagggcattttcaaccgtgaaaccgggcagtcgttcctcgacaacattctgagccgtggcggttcagaagagccgatggatctgttcaaacgcttccgtggtcgtgaaccgcagctggatgcgatgctggagcattacggcattaagggctgatcattcagtgaaaatctgcttaattgatgaaacaggcaccggagacggtgccttatctgttctggcggcccgctgggggctggagcacgatgaagacaacctgatggcgctggtgttaacgccggaacatctggaattgcgcaagcgtgatgagccaaaacttggcggcatctttgttgattttgttggcggagcgatggcgcaccgacgcaaattcggcggtggtcgcggtgaggcggtggcgaaagcggtgggcattaaaggcgattatttgccggatgtggtggatgccactgcaggacttgggcgcgatgcctttgtactggcttcagtcggctgccgcgtgcggatgctggagcgtaatccagtggttgccgcgctactcgacgacggcctggcgcgtggttatgcggatgcggaaatcggcggctggttgcaggagcggttgcagttaattcacgcctccagcctgacggcgctgactgatattaccccgcgcccgcaggtggtttatctcgacccgatgttcccgcataagcagaaaagcgcgctagtgaaaaaagagatgcgtgtctttcagtcgctggtgggaccggatcttgatgccgatggattactggagcctgcacgcttgctggcgaccaaacgcgtggtggtaaagcgcccggactacgcgccaccgctggcgaatgtcgccacgccaaacgcggtagtcactaaagggcatcgctttgatatctatgcaggtacgccagtgtaaaactaaaacagggtagcgataacgctaccctgctttctgcaagaataattaatggctttccggcgtcgcaatcatgcgtttcagccacggcaccatcaacagcatcactactgcaacgcccagcgtgaccagaccaatcttaccaaacacgttggtatagacgggcaacgtctcaagcggatcggtaatgttgtccggcaccgcggtaaatgttgccacatagccgcccagcaagaacgcggcagcctgcgtcaggaaccacatcccgagaataaagcccatcaaatgctgcggcaccagggcagcaatcatcgccaggccaagggcgctaataaacagttcacctaagctctggaataagtacaccagcacgataaaccatggcgatgtcagcccttgtgcatccgcaaaccacattcccgcagctgccgccgtcaaaaagcccagtgagcacataaacatgccgagagtaaatttcatcggcatcgagaggtctttgcctttgttacccagatgcgtgtaaatgcctgccagtattgggctggcgagtaccacccagaacgggttaagcgcctggaagctgaccgggttgatggaaaaaccgagaatttcatgatgcacgttgttgatggcaaagaagttcagcgatgttggcatctgggcgtagagaatgtaaaacaccaccgcttcgagcatcaggacaaaggcgacaaacattttattgcgcccggttttatccagcttgaatgcctgacgaaagaagatgatggtgacgacgatggagagaacaatcagcaccagattggcgacttctacgttgtgcatcagccatgcgcatacgaagatcatcaccacgctgccaagtaacacgtacaacagtttgctgaagctcattggccggaagtcgggttcagaaccaatgtctttcaccattccacgacaggcgatgtaaaccagtaatgcgataattaaccccgccccgcacaggttgtaggtgactgaataaccgaatctatcagcgatcacaggggccagcgataacgctatcaacgagccgatgttgatcgacatatagaacagggtgaatgcgccatcaagccgcggatctttcggcggatagcacttcgaaagcaagctggctgggttagctttaaacaggccgttaccgacagcgatagtccccagggcgatgaaaatcaggtcaggcttaagtagcgacatgccggtcatgaagtagccaatcgccagcacaagtgctccaagaacaatggtgcgtttggtccccagcaggtggtcgccgacatagccgccaatggaaatgaggccatagaccagcgcagcaaaagcaccaaaagtgacaaaagcctgctcttgcgagaatccaagctgtttaacgaagaaaaccgccagtacgccctgcacgccgtagtagccgaatcgctcccataactcgacaaaaaagatcatgaaaaatgggcgaggttgctgcagcatccccatgggtgttgttgtattcatatttattaaccttccaataccatcctgaaaagtatgaacgcgtaagggataacgcgcgaaaaagtttacatctgtcagagattcttaatattgatgcggtgaatagattaatacactattacaacagaaaataaccagatgatcacactaatgatggaaaatatgatggtgttaaatgttgtattggctggggattttgattgcgtacgcagaccgtaggccagataaggtgtttacgctgatcaggtaacaaggcgcgccaaaaagcaaaacgcccgcatatgcgggcgttcaggaacacgtcgtagagggaagattattcttcttcgtcgcgcagcggaacaatcagcatatcaacgtgaacggtgttgatcagttgacgtgcggaagacatcagtttgctccagaagtcctggtggtgaccacaaaccaccaaatccatatcgtatttcttgattgcatcgaccagaacctggcccaggtcgccgctgccgctcagggtttcagtgattgggtagcctgcattagtggaaagctcggtcagtgcatgatgtgtctcttcagagatgcgtttctgcatatcacccagattcacatcaataagcccggtgtataggtcagagtagtttacatctacgtggatcagagaaactttcgcattgtaggggcgagccatagagactgctttctctaccagaactttgctttccggggagaggtcgaccgcgatgagaatgtgtttataagccatagtgttactccttccataaagttgtcgatgactggccagctagcgtttcttgtgccgttacgtcacccgcgtcctgcgaactacgtgcgcggggctaacccagccgtaaagattcagtgttaagaccatccttaccttatagcgacccggatgatccgtcaatccgccttgcttactcgttagataaacaaattttcgacatgaatatattgatagtggttaaccttctggaaaaaaaacaacctgatctcctacactatctatagagccgctcgtatgttggtcaccacaaaagcggtttctccaggacctggtgttaactgattggcagcgtatcgggagcggtagccccggggtggaactccgcgggcaggtcgccggggaggaggtatgataagcaccgtcgcattattttgggctttatgtgtcgtttgcattgttaacatggcgcgctatttctcatcactacgcgcgttgttagtggtactgcgtaactgcgatccattgctctatcaatatgttgatggagggggcttttttacctcacatggccaacccaacaaacaggtgcgtctcgtttggtatatctatgcccaacgttatcgcgatcatcacgatgatgaatttattcgccgctgtgagcgggtgcgtcggcagtttattctgaccagcgcattgtgtggtctggtggtggtcagcctgattgcattgatgatttggcattaagcacttcagcaataataacgcataaaaaaagcgggccagtaaactgacccgctcgagactgattacaaacgcaaaattgcctgatgcgctacgcttatcaggcctacataatctctgcaatctattgaatttgcatgtttttgtaggccggataaggcgttcacgccgcatccggcatgaacaaagcgcactatgtcacaatctgaagcgggccagctgacccgctcgttttggtgcgtacgattacaggaactgcaaggagagccagtacagcccgccggaaagcagtaccgcagccggaagggtaaacacccaggccatcagaatgctggtcacggttttacgctgtaagccgccaccatctaccaccatcgtccccgcgacagaagaggagagtacgtgagtagtggaaaccggcatcccggtataactcgccaggccgatagacactgccgccgtcatctgggcagacatcccctgagcgtaggtcatgcctttcttaccgattttctcaccgatagtcgttgccacacggcgccagccaatcatcgtaccgatacctaacgccagcgcgaccgccatgatgatccacaccggtgcatactcgatggtgctaagcatgtcggacttcagtttcttcaacaggcgctgatcgtcagcactcacgccaggcatcttcaccactttgtcgatagtgtcagaaacgcacagcataatgcggcgcatctggctacgttgatcaagcgacagcttgtcgtagctttccacatcggtggtcaacatacctttcaggcggttgagcgcgttaatggtattcgacggatggcagtggaactccgcaggttgcgttgcgccagcttccggagccggtactaactgatcagcaccggtagcctgtttgagcagcgcaggatgctgctcaaagtaagcttcgacgttgttgatggcatcacgggtacgggtgatttcgtagccagtggcattcatgttcaccacgaagcctgctggcgcgacgccaatcaataccaacataaccagaccaatgcctttctgaccatcgttcgcgccgtgcgaaaacgccacgccgatagcggaaaggatcagcgcaatacgcgtccagaacggcggctttttcttgccgtctttcttttcacgctccgctggggtcaggtggatacgggcgcgtttcttggtgccgctccagtagcgacgcagcaagaaaatcagaccgccagcaaacaccaggccgacaataggggaaacgatcagagaaccgaaaatacttaatactttcgggatattgagtgcatccaccactgacgtcccggtcatcaacgcattggttaaaccaatcccgatgatcgcgccaatcagcgtatgagagctggatgcaggtaaaccaaagtaccaggtacccaggttccagataatcgccgccagcaacatagagaacaccatggcaaggccatgagacgatcccatattaagcagcagatccgtcggcagcatatgcacaatggcataggcaacactcagaccacccagcaaaacacccaaaaagttgaataccgccgccataaccacggcgagctgagaacgcatcgcgcgggtatagataacggttgccacggcgttggctgtgtcatggaaaccattgatggcttcgtagaacagcacaaaagccagtgcaagcaataataacagcccggtatgcaaatccaggccagcaaacaaatgtagcataggacgttacgccattttgaggacatgaacgcggcgcattatcagtgactttcgcggcgcgggcaaagtgaaatatagactttttttgatttgccccctgtatggatttcactcaaaaaataattatcttatataattcaggcaaatacttccttttagtaatattgatgctggtgcgaccactgaggaatctttacaattcacgcccgttttttctaagaggagcgcaacgtggaaaggtttgatgccattattataggcgctggtgcggcgggtatgttctgttctgcgctggcaggtcaggcaggacgccgggttctgctgatcgataatggtaaaaaaccagggcgcaaaatccttatgtctggcggtgggcgctgcaactttaccaacctttatgtcgaaccaggcgcttatctgagccagaatccgcatttttgtaagtctgcactcgcacgttttacccagtgggatttcattgatctggtcaataaacacggcatcgcctggcacgagaaaacgttagggcaactcttctgcgatgactccgcgcagcagattgtcgacatgctggtggatgagtgcgagaagggcaatgtgaccttcagattgcgtagcgaagtgctgagtgtggcgaaggatgaaacaggcttcacgcttgatctgaacggcatgactgtcggttgcgaaaagctggtcatcgcgactggtgggctgtcaatgccggggctgggcgcgtcgccgtttggttataagattgccgaacaatttggcctcaacgtgctgccgacccgcgcgggtctggtgccattcactctgcataaaccgttgctcgaagagttacaggtgctggcgggcgtggcggtgccttccgtgattaccgctgaaaacggcaccgttttccgtgagaacttactcttcacccaccgcggcttgtctggaccggcggtgttgcagatttcaagctactggcaaccgggggaatttgtcagcatcaatctgctaccggatgtggacctcgaaaccttcctgaatgagcagcgtaacgcacatccgaatcaaagcctgaaaaacacactggcggttcatctaccgaagcggttggttgaacgcttacagcaactcgggcaaatcccggatgtttcgctaaaacagctcaacgtgcgtgaccaacaggcactgattagcacattgaccgactggcgcgtacaacccaacggcactgaaggctatcgcactgccgaagtgacgctcggcggcgtggacaccaacgaactctcttcacggacgatggaagcgcgcaaagtgcctgggctgtacttcatcggcgaagtgatggacgtcaccggctggctggggggctataacttccagtgggcgtggtcgagtgcgtgggcttgtgcgcaggatttgattgcagcaaagtcgtcctgacctatttcctaaagatgaaaattattagagtcgcattaaaaatgagctaattttgatagtggttatcttgtgattattttctaatgagcccgtgaactgaaaccctccatgcttaatataaggtggatggaaaggtgattgaaaactcacccagtggccagatctttatgaaatatgaacaggttgaaaaaaacagtaactttgctgttttttatacttaaccactatgcattaatgctgcgttatttcatgatgcctaagaaaaaccagcgttacgcaaatggtcaacgctggttttatccggtacgttgcaattattttttagcagaacccgcttctaatattgaaacgattgagaacaacgtaaagcataccgctcccaaaccgaccagaactcgcgaaggaataaaatatcccatgtcggtctgcgccatttccgcaagaaacgatgccaggaaaaggcaaaacaggcaggtgaagacgggaatcatcggtattctgttggctaacgaacaggtacgtctccataccagtgccagtagccagacttttgagaatatgctgtaacagatcattccgaggcaaataagaataatgccgggagccagtcgggcgcttgcatcggaactgactaagacgtatatcccctgcagtaccgtgattgagccgagaaaaataacccaataacaccacagccagtgttctttagttgaaaacgtattacgtgtttgatggacaattgtggcaacaaggccaattagacaggcacagattgcggttaacccaagcaatacgtgacccgcgacataatgcggagttatgtcagcactacgtaacagcgtaatagaccaaatgaaaccgagcagggtgagtaaaacgggaacggcaatgaggcagttaccgattaatgaagaataagcctgtaccggtgttccgtcgctcttgctccccgctgcatttttgggaatgagcagaaagtgaccggatgacgctgccaccgtcgatacacaggcggcaatcataccaacgccgaaaataacatggccggcgacaaactcgtctgccatcacatcattgcctgctaacagtgcccaaccccatatcatggtgataattgaccccgcatagccaataatggggaacaatgtattgtaaaacgtattaacgccgcgcgtgagctgcgaaatgataataaatgcggtagtgaataatgccaggcatatggccgccagagaaatcagcacatgacccgcgacgaaatactcgctttgccctgaactttccagcacaaagccacctaacgcgatacaaattaagcccataatcaaagggattaatttgaaaagccacccgatatatatgttcactttaaactcctcaggtatccctgctaatattgaaatatgcattaatgataatttcatcctgttaatataatgacgagatatcattaaagacaaatgcatagcataactatagcggggtttactttgcagagcgctacttttcagcgttcaaaaggccatgataaataaaaatttatcctaagattaattcttatgctgttgttttttacaattatcttccagggagggattattcttcattatttggtaaaagaccggatagtctcggtgcttaaaatcagcgaacatataagtattattattttatatcgtcgtaaatctgtttttcagacaagtatcatttattttgttacaaacaattcaaaaatatcacaggttatttatgaaagcaattgacaatcagattagaaacatctcttcaagccatcaagataagcattcagataaagttaacagtcatcaacaccatggcaaggttgataaaacacatcgtgcaaagatagttgaatttgataaactggataatgattcgcaaatagataacgattttggcctgcatatcatctatttcctgcaacatggtcactggaaggtaaatgatcgtagtcaccagatggagaaagtatggttttataatagtgaaccttctatagatattcaagaatataatagattcgccgacaatactactgatacgtttatctttacaattataccagacaataaccatgtgttaaaattatcgtctcccattaccgttactgttgagtgtaagggcggttattattttattaattcctctggagataaatcagatataatttataaagttgatgggctttctatcatagcgagaaatttctttactcttcttagtggtaatttcaaacctgactggcgttgggatgtctctaaagagacgtttactaaggaaaagtttgatagctatgttaaatctgtgttttcaaaaatagacttctataaacagtgtggtgtgattaacccacaaaatgccaacacggcttattttggcgatacagatggaagagtaggcgctgtactttatgcattgctcgtttcagggcatataggcatcagggaaaagggttggagtttattatgtgaattattaaaacacgaagagatggcttcatctgcatacaaacataaaaataataaagtgctctacgatttattaaatacgagagacatgatcttgaatgagttgcatcaacatgtttttttaaaggacgatgcgataaccccttgtatcttccttggggatcatacaggcgatagatttagtactatttttggtgataaatatatccttactttgctaaattctatgcgaaatatggagggtaataaagatagccgtattaataaaaatgtcgtcgttctggctggaaatcatgaaatcaattttaatggtaactatactgcacgactagcaaatcataaactctctgccggtgatacgtataacttaattaaaacgctcgatgtttgtaattatgactcagaaaggcaagttttaaccagtcatcacggaataataagagatgaagaaaaaaaatgttattgtctcggtgctttgcaggttccatttaatcagatgaaaaatcctactgatcctgaggaattagccaatatttttaataaaaaacataaagaacacatggatgatcctctattccatctaatccgaagcaatactttgaaacccacacctgtatatgctaattattttgataacactactgatttcagaccagcacgtgaacgtatcttcatatgtggggagacactcaaaggtgaagaccccagcaaatacattagacaaaaatatgggcatcatgggcccggggtagatcataatcaacaatttgataatggtattatggggctaaattccctgaaggaagcacgtgataaaaataataaaataatttattcctcagggcttagttgttttcaaccacattaaaactccatgaatacggtggtatgtctttttaatcctgccagtatttcataggttttcttaatcgattgtagaggcatgttctgatgacgcctctacaatctttagggactttctctgctatgagataagaaatttcatattatgctttgaggctgaatgatttgtgcaaaatataattattttcccatcgaacatgaggtgtatgtcataagataaaatgttaactatgtattcctcgcggtaaataatatgaggtaaaatatgaaaattggaactgtggcaggcactaacgacagtacaacgacaatcgcaacaaatgatatggtgcaagagcatgttaccaacttcactaaagaactgtttgggtatattgcaaatggtataggtgatgatatatcaagtattgccaggacaatgctcggtgaggttgtggaaaaaatagatgattggcaaatagaacggttccaacaatctattcaagatgacaaaatttcatttaccatacaaacggatcattcagaaaaatatagtatgctatcgggcatgcgtgctcatattctacgtaggaataataattatcagtttattgtgacaattaatagcaaaaattacggttgctctcttgataataccgatgttaattggtgcagtattgtttatttacttaataatatgacagtaaatgataatgctaatgatgttgcagttactgagtcgtacaaacccatctggaactggaaaatatcgcaatataatgtatctgatattaaattcgaaacaatgataaaaccccagttcgctgacagaatctatttctccaattgtttacccgttgatcccacaagtaccagaccaacctattttggtgataccgatggctcagtcggtgcagttttgttcgcgctttttgcaacgggacatttgggaatcatggctgaaggagaaaatttccttagccagttgcttaatatagaagatgaagttctcaacgtattgctaagggagaactttaatgagcaacttaacactaatgttaatacaataatcagtatcctgaacagaagagacattattttagaaagtcttcagccttatttagttattaataaagacgctgtgacgccatgtacgtttctgggcgaccaaaccggcgatcgatttagcaatatctgtggtgatcaatttatcatcgatttgttaaaacgcataatgagtatcaatgaaaatgttcatgtattagctggaaatcatgaaacgaattgcaatggtaactatatgcagaacttcacgcgtatgaaaccactcgatgaggatacctactctgggataaaagattatcctgtatgtttctatgaccccaaatacaaaataatggcaaatcatcatgggataacttttgatgatcagcgaaaacgttacattataggaccgataacagtctctattgatgaaatgaccaatgctctcgatccggtcgaattagcggcaattatcaataaaaagcatcatgctataattaatggcaaaaagtttaaaactagccgggctatctcttgtcgatcctttaatcgttatttttctgtttcgacagattacagacctaaacttgaagcactattagcatgttcacaaatgttaggtataaatcaagttgttgcacataacggaaatggtggaagagaacgcataggcgaaacggggacagttttaggtcttaacgcccgtgacagtaaacatgctggaagaatgttcagcatgcataattgccaaattaaccctggtgcagggcctgagataaccactccctggaagtcttaccagcatgaaaaaaacagaaatggacttatgcctttgattagaaggcgcacaatgttacagctctgaaccatagacaacatgaatattaatgttactatctggttgagactgttgataaaacgtaaaaaggaatgctctgttcctgcaactgaacaggcgtgaaacgctatccaacaggatggataccgttttgtcagccagttttatagatcacacttatgagtatgcgtgtttcatttacggccaggaatgctgatgatgacaacattactacccgttttcactaagccttccccgttggcgctcaatgctctgcgcgctggtcgtatttgccgtttccttcttatcccggatggaagaatccgctgaacgtcgttcggcggcagttgtaacacgcgtcgtttgcttacagggattatggcgggtcgattatggataagagtaagcgccatctggcgtggtgggttgtcgggttactggcggtggcggctatcgtggcgtggtggctgttgcgcccggcaggtgtgccggaaggctttgctgtcagtaatgggcgcattgaagcgacggaagtggatattgccagcaaaattgccgggcgtatcgacaccattctggtgaaagaaggccagtttgttcgcgaaggtgaagtgctggcgaagatggatactcgcgtgttgcaggaacagcgactggaagccatcgcgcaaatcaaagaggcacaaagcgccgttgctgccgcgcaggctttgctggagcaacgacaaagcgaaactcgtgccgcacagtcgctggttaatcaacgccaggcagaactggactccgtagcaaaacgtcatacgcgttcccgttcactggcccaacgaggggctatttctgcgcaacagctggatgacgatcgcgccgccgctgagagcgcccgagctgcgctggaatcggcgaaagctcaggtatcggcttctaaagcggctatagaagcggcacgcaccaatatcattcaggcgcaaacccgcgtcgaagcggcacaagccactgaacggcgcattgccgcagatatcgatgacagcgaactgaaagccccgcgtgacggacgcgtgcagtatcgggttgccgagccaggcgaagtgctggcggcaggcggtcgggtgctgaatatggtcgatctcagcgacgtctatatgactttcttcctgccaaccgaacaggcgggcacgctgaaactgggcggtgaagcccggctgatcctcgatgccgcgccagatctgcgtattcctgcaaccatcagttttgtcgccagtgtcgcccagttcacgccaaaaaccgtcgaaaccagcgatgaacggctgaaactgatgttccgcgtcaaagcgcgtatcccaccggaattactccagcagcatctggaatatgtcaaaaccggtttgccgggcgtagcgtgggtgcgggtgaatgaagaacttccgtggcctgacgacctcgtggtgaggttgccgcaatgacgcatctggaactggttcccgtcccgcctgtcgcgcaactggcgggcgtgagccagcattatggaaaaaccgttgcgctgaacaatatcactctcgatattccggcccgctgtatggtcgggctgattggcccggacggcgtcgggaagtcgagcttgttgtcgttgatttccggtgcccgcgtcattgaacagggcaatgtgatggtgctgggcggcgatatgcgcgacccgaagcatcgccgcgacgtctgcccgcgcatcgcctggatgccgcaggggctgggcaaaaacctctaccacaccttgtcggtgtatgaaaacgtcgattttttcgctcgcctgttcggtcacgacaaagcggagcgggaagtgcgaatcaatgagctgctgaccagcaccgggttagcaccgtttcgcgatcgtccggcagggaaactctccggcgggatgaagcaaaaacttgggctgtgctgcgcgttaatccacgacccggaactgttgatccttgatgagccaacaacgggggttgacccgctctcccgctcccagttctgggatctgatcgacagtattcgccagcggcagagcaatatgagcgtgctggtcgccaccgcctatatggaagaggccgaacgcttcgactggctggtagcgatgaatgccggagaagtgctggcaactggcagcgccgaagagctacggcagcaaacgcaaagcgctacgctggaagaagcatttataaatctgttaccgcaagcgcaacgccaggcgcatcaggcggtagtgatcccaccgtatcaacctgaaaacgcagagattgccatcgaagcgcgcgatctgaccatgcgttttggttccttcgttgccgttgatcacgttaatttccgcattccacgcggggagatttttggttttcttggttcgaacggctgcggtaaatccaccaccatgaaaatgctcaccggactgctgcccgccagcgaaggtgaggcgtggctgttcgggcaaccggttgatccaaaagatatcgatacccgccgtcgggtgggctatatgtcgcaggcgttttcgctctataacgaactcaccgtgcggcaaaaccttgagttacatgcccgtttgtttcacatcccggaagcggaaattcccgcaagagtggctgaaatgagcgagcgttttaagctcaacgacgttgaagatattctgccggagtcattgccgctcggcattcgccagcggctttcgctggcggtggcggtgattcatcgcccggagatgttaatcctcgatgagcctacttctggtgtcgatccggtggcgagggatatgttctggcagttgatggtcgatctctcgcgccaggacaaagtgactatcttcatctccacccactttatgaacgaagcggaacgttgcgaccgcatctcactgatgcacgccggaaaagtgcttgccagcggtacaccgcaggaactggttgagaaacgcggagccgccagtctggaagaggcatttatcgcctatttgcaggaagcggcagggcagagcaacgaagccgaagcgccgcccgtggtacacgacaccacccacgcgccgcgtcagggatttagcctgcgccgtctgtttagctacagccgccgcgaagcgctggaactgcgacgcgatccagtacgttcgacgctggcgctgatgggaacggtgatcctgatgctgataatgggttacggcatcagtatggatgtggaaaacctgcgctttgcggtgctcgaccgcgaccagaccgtcagtagccaggcgtggacactcaacctctccggttcccgttactttatcgaacagccgccgctcaccagttatgacgagcttgatcgtcggatgcgtgcgggcgatatcacggtggcgattgagatcccgcccaatttcgggcgcgatatcgcgcgtggtacgcctgtggaactcggcgtctggatcgacggagcgatgccgagccgtgctgaaacggtaaaaggttacgtgcaggccatgcaccagagctggttacaggatgtggcgagccgacaatcgacacccgccagccaaagcgggctgatgaatattgagacgcgctatcgctataacccggacgtaaaaagcctgccagcgattgttccggcggtgatcccgcttctgctgatgatgatcccgtcaatgctaagcgcccttagcgtggtgcgggaaaaagagcttgggtcgattatcaacctttacgtgacccccaccacgcgtagtgaatttttgcttggtaaacagttgccatacatcgcgctggggatgctgaactttttcctgctctgcggcctgtcggtgtttgtgtttggcgtaccgcataaaggcagtttcctgacgctcaccctggcggcgctgctgtatatcatcattgccaccggaatggggctgctgatctccacctttatgaaaagccagattgccgccattttcggaacggcgattatcacgttgatcccggcgacacagttttccgggatgatcgatccggtagcttcgctggaagggcctggacgttggatcggcgaggtttacccgaccagtcattttctgactatcgcccgcgggacgttctcgaaagcgctggatctgactgatttgtggcaactttttatcccgttgctgatagccatcccgctggtgatgggcttaagtatcctgctgctgaaaaaacaggagggatgatgcgccatttacgcaatatttttaatctgggtatcaaagagttgcgcagtctgctcggtgataaagcgatgctgacgctgattgtcttctcgtttacggtgtcggtgtattcgtcagcgaccgttacgccaggatcgttgaacctcgcgccgatcgccattgccgatatggatcaatcgcagttatcgaaccggatcgttaacagcttctatcgtccgtggtttttgccaccggagatgatcaccgccgatgagatggatgccggactggacgccggacgctataccttcgcgataaatattccgcctaattttcagcgtgatgtcctcgccggacgccagccggatattcaggtgaacgtcgatgccacgcgcatgagccaggcatttaccggcaatgggtatatccagaatattatcaacggtgaagtgaacagctttgtcgcgcgctaccgtgataacagcgaaccgttggtatcgctggaaacccggatgcgctttaacccgaacctcgatcccgcgtggtttggcggggtgatggcgatcatcaacaacattaccatgctggcgattgtattgaccggatcggcgctgatccgcgagcgtgaacacggcacggtggaacacttactggtgatgccgataacgccgtttgagatcatgatggcgaagatctggtcgatggggctggtggtgctggtggtatcgggattatcgctggtgctgatggtgaaaggtgtactgggcgtaccgattgaaggctcgatcccgctgtttatgctgggcgtggcgctcagtctgtttgccaccacgtcaatcggcatttttatggggacgatagcgcgttcaatgccgcaactggggctgctggtgattctggtgctgctgccgctgcaaatgctttccggtggttccacgccgcgcgaaagtatgccgcagatggtgcaggacattatgctgaccatgccgacgacacactttgttagcctcgcgcaggccatcctctaccggggtgccggattcgaaatcgtctggccgcagtttctgacgctgatggcaattggcggcgcatttttcaccattgcgctgctgcgattcaggaagacgattgggacaatggcgtaaatacaattgcccgatgcgtaagcttatagggactacgcatcggtgcaatttattgaattttagttgtttttaggccggataaggcgtttatgaactgacccccaaaacctggacagtttcagttaaccggctttttgatactcagtcctgtattcagggcaagattacgaaagcccgctccccgcaaggactgacgccagatagtttctgtccatggctgcttttcgcatcttacgtcttaaccctgccttgaatatgggaccgccatactgagtcatatctccctgacgcgccgctggttttccgctcatgattcaattccttcttctgtttatttttaatgctggtttgttactgaataccgaacaggtacgggatcagtactctctcatatccggcgtatcctgcttttcatcaggggtcttcggtggggatttcgaggctgcacagttccagttaatcaacagtgagtcaccattaacctgctccttaccctgcaaatgaatttttgtgccgttgagaaaaatttgtccgtccttcgtcagcaccagccttgccttaccacagcagagctccagatgctcaccggcggagtaaatcgcggtctgcccggtatcatcctttttcgttttaccaacggtgaaggtaacgttatttccgactttgacgtcataacccagcccgaccctcaacgatttatgcaaaccgatctgcgaggactgcatcagagccaccgaagtgttcataatgccacctaccgtcgtctggtacgccacgcccacggtcagcgcacgaacaagtccaatcgtttccacctgaacagaacccactttaattatctggttactgcccaccgtctctatctggttgacacccaccgtctgtatctgattgttggtaaccgcaatcatctgattgttgccaatggtttcagcatggttgtttatcacatcagtggtgcggttattcagcacctcggtgttcatgttcttctgcgcgtggatgtagacctgttctttccctgtcgcatcgtcaaacttcagttcattaaacccgctgcccttataggttttcgaacgaatggtcatctgcgtcttcgtccccggcaggctgccgggtgtgcggttttcatggtggtaggtacgccccataataatcggctggtccgggtcgccgttgaggaagtccacaatcacctcctgacccactcgcggtatcgccaggttgccaaagccggtgcctgcccacgcctgtgccacacggatccagcatgaactgtcctggtttgacgggttatagcggtcccagttaaatttcacccgcacgcggccatgttcatcacagaagatttcctcgcctgccggtcccgtcacgacggcgctctgcgggccgtcgaccagcggtttcagcaacggctgtggtcgccatgttctgtctgccgggatcaccgcaaaatggttctccagcgccgtccccgctccctgccgtcctggcaccgcctgtggctgttcgccgtgcagttcacttgccaccacctgccattcccggttcaggttcgcctgcggatgccccgtcagcacaattcgtcgtcccggccatatctccggcgagcgactcattccccgcgcggtttctgcattgtttcgccagccgtccatctgccagcgggcaaagttctgcccgtgggcacccttgaaacgtccggggtagtcatacacttcatactgcgtgcgctggtagtcctggtgctggccttcctgttcaaaacgtccggcccagccggggcgtttaaaggtgtagtctttggtcaccacggaagaagggcggatttgtgcgctgtagcggaactggctgatgcagagggtgctcacctcggtacgggtgttcgggttccatgggatttcaaaagattcgggcagatggcggactgtgtcgcacagcaccaggctctggtcggtacttttgtaagcatgctcctcataaaagaagatgccttcctccgccgccatccggcacaggaaatcgtaatcagtctcaccgtactggacacaaaactcacgggaaggatgcggctcgctgaacagcggactccattcggtcaccccgttttcctgcaacatcgtgccgaggatgcttttgatgtcctcgttctggaagatacggaagttctggcgcagaccggcacgccacagcggcgggtgcaccttcatgctgtacagcatctggtttttgtcgttctccccgagttcaaaccaggtcaccacgcctttcacccggcgctgtacttcatcgccctgccatatcgtcaggtaggccattttgtccagcacctgcgcaaattcaagggagagaaactgctggctgaccagggagagatcgagggaaaagagcgaagagagtgactggttcagatgaaaggaaaccaccgcaaaagcatccggcggcaggccgtccacttccagtgtgaaacgtaatccggttgacatagcaacctccgtgaaaatgaataataatccgcacatattgcatgtacaacatgtcgggcggatgagataagcgagtcgacatctggcgttaccggggaatatcagaaaaatgtcatggttatgtgatgatttagtctgggattttacttcagagaaacgggtgtctgtttagtcaacaaaataatcacaaacgcaacggatgggttctcgacgttattcacgacaggctcgtacattacagcgagtaataaaaaacctgatatgcaaagtcaaaccaatattcataatgtctttttattcacaacaataaataattcaataacaatcattgaaatgaatgatggtttgtataaggaatatacgctaccgccccaccctgataacatgatctgcacattgccatcttaacgtcgttaaacactagcttaatagtggatatttcaaattaggaatttattaaattcacctgatgaatataataagcaaatagcatagaaaataatgacaactcccccgaggggaccatttccaaagcactgcaccaccacctggtgccggatgatcttgcttcagtggtaagagtacctgatgcattgttcccaaaatggtgttttcccctgcccctccaataatgtgtagctctcacttgataatctattgattaggttatattaagaatcaacatttaaaatacatccattttcttgaataaatcaacatgtttattaatcaattgctgttttagctctgactcatcaagctctccatatttgtcctacagataattgcgaataaatacagagaacgccatttatccttttagcatacctgccggatatttttatttgtattaatattaattgcatctccaactccgagcatatccatcattaaaaacattttgagattatagaatgcctgtgataacaactgaaacatctgcacaatgtgaatagttagtttcttttcagaggaaatgaaatagacacgctgaatgaaaaggagagtgatataaattaaaaaacataccatgaatttaattaattacgcccatcattgtggataaagttactgaataataaataacataatcttctggtatcccactcaaataatttcattcctttttaatacttcttgtaatttcggtaactgacatacagcatcagcaatcgcactgatattcgtggcattatcctgaaaccattcatgcccaggcccccatgtgcgcatagtgcaaagataacagtccaccagcgttagttgctcaccaaacgcataaggttcagcagtgagctgcgaattcaaccagatataaagcgattttcgatattcaataacattcttctttaactgttcaggtgcgtcaggagcccaacgctcagggtaatcggcgaaagtgaatgttggatagacattagcaaccagccagaccaatagccgttgaaacagctgacgttcggcgcgcccaaccggtggcgcaaggtccgggcgacgatcgagaaccatcaatgcaatcgccgctgtctccgtcataatctcgtcattttccaatgccagtgtcggaacctgacacaacgggttcagggttttcaataactcgcgtgaagctccctcgtggtcaaaaccactgacatcaacgaactgataaggaatatcagccagtgttagcatcagctcactgattgtagagccccatccgggtacgccatacaccttaatcatatgcccctcacaatcttttaaagattaagtgtaggacagtacacaggttaaccagcaaaaggatttgtcattttttcgtcagttgtattaatccccttcaggattgtaaggggatgttttgcatcgtttatcgataacgggtaggatgctgcgccgatagttttatacccataaagaataatggtgataactatcatcgccaggatgaataaacattgttcatggcaacttatatgactttttcattaaagcaatcagggagagcaatgagtaaacacgacaccgacacttcagatcaacacgccgcgaaacgccgctggcttaatgcccacgaagaggggtatcacaaagcgatgggcaatcgccaggtgcagatgatcgccattggcggcgcgattggcactggcttgtttttaggtgcaggagcccgactgcaaatggcggggcccgcactggcactggtttatttaatttgtggcttgttttcgttttttattctgcgtgcattgggtgagctggtgctacaccgcccttccagtggcagttttgtttcttatgcccgtgagtttttgggtgagaaagccgcttatgttgctggctggatgtacttcatcaactgggcgatgacggggattgttgatattaccgccgtcgctctgtatatgcattactggggtgcgtttggcggcgtgccgcagtgggtctttgcgctcgctgcacttaccatcgttggcaccatgaatatgatcggtgtgaaatggtttgcggagatggagttctggtttgcgcttattaaagtgctcgccattgtgacctttttggtcgtgggtacagtgttcctcggtagtggtcagccgctggatggcaacaccactggctttcatttaatcaccgataatggcggcttcttcccccacggtttgctgcctgcgctggtgttgattcagggcgtagtgtttgcttttgcctccattgaaatggtgggtacagctgccggagaatgtaaagatccgcagaccatggtgcctaaagccattaacagtgtgatttggcgtattggcctgttttacgtcggctccgtggtgttgctggttatgttattgccgtggagcgcgtatcaggcggggcaaagtccgttcgtgacgtttttctctaaactgggtgtgccatatatcggcagcattatgaacattgtggtgctgaccgctgccctctccagcctgaattcaggtctgtactgcaccggacgtattctgcgctcaatggcgatgggcggttccgcaccgagttttatggcgaaaatgagtcgtcagcatgtgccgtatgccgggattctggcgacactagttgtgtatgtcgtcggcgtattcctcaactatctggtgccgtcgcgcgtatttgagattgtgttgaacttcgcgtcgctgggaatcatcgcttcatgggcgtttatcatcgtgtgccagatgcgcctgcgtaaagcgattaaagaaggcaaagcagcggatgtcagttttaaactgcctggcgcgcccttcacttcctggctgacattactgtttttactgagtgtccttgtgctgatggcgttcgattacccgaacgggacttatactatcgcggcgctgccgattatcggtattttgctggttataggctggtttggtgtgcgcaaacgcgttgctgaaattcacagcactgcgccagtcgtcgaggaagatgaagaaaaacaggaaattgtgtttaagcctgaaacggcgagttaattgcaaaattgcccggctacgtgccgggcaaattcagattactgacgaaagtgccggatacgccgtgataaaaggcaggcaagtctcaccgttttcaccctcgccatatctattacagcgcaatacgaatcacatcgtctggctgggtagcttcctgctgtttagtggatttttgtttcacactgacatacagcgttttgccatcggcagacagcgccaggctgtttggatgagtcggcgtatcgaacgttttcaccactttatagcttttcgcgtcaatcacactgactttacctgcctgacgatgcgttacgtaggcttcattacgcgcggggttaaacagcacagccagtgattccggtgccgcaaccttcgccagaatattgccattacgggtatcgaccactaacacttctgcggctttagaatcggtgataaatgcacgctgcctggcggtatcaaggctaatgttgataaagaagtgctctttgccgtcatccagcagctttttacggctgaggattttattgtcggcggtgtcgatggtaatcaattcgccgtcagcgttagtggtgtaaagacgtttgccttcgctatccagcgccagaccggtactcattttaccggtgttctggatggcggttttcagtttgatattcccgccatcaacgacccaaatcacgctctctttaccaataccactgatgtaaacggtgttcgtggcatcgtcagctaccagctcacgcggttgcagcgggcgcacctcttccgtgcgcttacgatcatccagcaccagacggcctttcacttcgcccgttttggcatctatcgccgtgaccgcgctgtttacggtgttaccaaaccacaacgtctgagtcgtgttattgatggtggcaccaaacggcttgagatcgttatggatcgcctgcgtcacttccagagtgaccggatcaagacgataaaccacgccacctttatccagtttgcggctttgcgaagtggcgagccacagcgcgttttcttgctggctataagccatttcgtaggcacctttacctaccgctttacgcagcatttcttctgcggcctgcgtactgaatgatgaaacaacaagcaatgaacctaacagtaatgaaccacgcaggcgcgatgaaaacagatgacgtaaatgcatgacgactccctttgatgaaccgatatttttgctgcttcacaatgcttcgctaagcgtaatcatcgttacgctcttgttataaatgggaatggtaatcattattttctcaaatgtggagcatttcttgccgttacgactacaattttctcaattacttaacgtattgtgccgtttcattttccataaatttacaatttcattaccatgacggcgttttcccattcttaacctggcttttttcatgaagattttttccgtccgacagaccgttttgcccgcactgcttgtcctttcccccgttgtttttgccgctgatgaacagactatgattgtcagtgccgcaccgcaggtggtttcagaactggataccccagcagcagtaagcgtggtggatggcgaggagatgcgcctggcaacaccgcgcattaacttgtccgaatcactgaccggcgtgcctggtttgcaggtacaaaaccggcagaactatgcgcaagatttacagctgtcgattcgcggatttggctcccgctccacttacggtattcgcggtattcgcctgtatgtggacggtattcccgccaccatgcccgacgggcaagggcaaacatccaacatcgatttaagcagtgtgcaaaatgtggaagtgctgcgtggccccttctctgccctgtatggcaacgcgtctggtggggtaatgaatgtcaccacccagaccggacaacagccaccaaccattgaagccagtagttactacggcagttttggcagctggcgctatgggctgaaagcaacgggcgcaacgggagacggcacacagcctggcgatgtcgattacaccgtctcaaccacgcgttttacgacccacggctatcgtgaccatagtggcgcacagaaaaatttagccaatgccaaactgggcgtacgcattgatgaagccagcaaattaagtctgattttcaatagtgtggatatcaaagcagatgacccaggtgggctaaccaaagcagaatggaaggctaatccacaacaagcgcctcgtgcagaacagtacgacacgcgaaaaaccatcaagcaaactcaggctgggttgcgctatgagcgtagcctgagttcgcgggatgatatgagtgtgatgatgtatgccggagagcgagaaacgacccagtaccagtcaatacccatggcaccacaacttaacccgtcacatgcgggcggcgtgattaccctgcaacgccattaccagggaatagacagccgctggacacaccgtggtgaactgggcgttccggtcacgttcactaccggcctgaactacgaaaacatgagtgaaaaccgcaagggctacaataacttccgcctgaatggcggcatgccggagtacgggcaaaaaggtgagttgcgtcgcgacgaacgcaatctgatgtggaacatcgatccctatttacagacgcagtggcagctgagcgaaaaactgtcgctggatgctggcgtgcgctacagctccgtgtggtttgattccaacgaccattacgttactccgggtaacggcgatgacagcggtgatgccagttatcataaatggctacctgccggttcgttaaaatatgcaatgaccgatgcctggaatatctatctggcagccgggcgaggttttgaaacgccgacgattaatgagctgtcttatcgtgctgatgggcaaagcggtatgaacttaggtttaaaaccatccaccaacgatacaattgagatcggcagtaaaacgcgtattggtgatgggctgcttagtctcgcattgtttcagaccgacactgatgatgaaattgttgtcgatagcagtagcggtgggcgtacgacttacaaaaatgccggaaagacccgtcgtcaaggcgctgaactggcatgggatcaacgtttcgcaggagattttcgcgtaaacgcgtcctggacctggcttgatgcgacctatcgcagcaatgtttgcaatgaacaggattgtaacggtaatcggatgccagggatcgcccgtaatatgggctttgcgtcgataggttatgtaccggaagatggttggtatgcaggcacggaagcgcgttatatgggcgatattatggcagatgatgaaaatacggcaaaagcgccgtcttatactctcgtcggcttattcaccgggtataaatacaattaccacaatttaactgtggatttatttggtcgtgtcgataatttattcgataaagaatacgttggttctgtcattgtcaatgagtcaaacgggcgatattacgaaccttcgcccggacgaaattatggtgtcggcatgaatattgcgtggagatttgagtaattaccttgatgcccggtatttgccgggcatttactttaacgattgtattgctggtataaaatagcaatattttgttgcataatttcagcaagacaatgtctgcatccctctttgtcttttgcttttaacgcagcgagtaacagatgatagttttctatatgctcccgtaattccgctggattaatcgcttcatagagataatgtaaaccaggccccatcctgacccacagttgctcaatcatctcacacaggatgggcatatttgagcgatgataaatcgctaagcgaaatagcctgtttacattaatgatttgttccatgtcgcccttttcttgcgcctgctgtaatttctcgagcaattcctggagttccgcaaggtcttgcggggtgaggttttcaacagccagagcaactgccattaattccagttcgtagcggatccgattgatttcgtctaattgacgtttccccacttccggaactgtaaatgcttgtgcaggtgcgacagaaagcgcattcaccgaaaccagacgtaataatgcttcacgcacaggtgtaatactcatacctaattgctccgccagatttttagtaatcaggcgtgcgccaggttttaatgcgccaatactaagctgatgtttcaggtcgttctcaacctgcagagtcaaactgacatgtttcatttttcccgttccaggcattttaattccttcgcgtgttttctgtccaaccctgcctgcatggcagaaggaattcacctggtgtattaaagtgaataatcataaaccactcacctttgttgttattagcagcagaacaatgatgtggttagttaattaaagctgaaaataagctttttgcctggatttttatggcggcttacgccgccgttgaaactttaatcatcacccgccacgcggatcaccactttgccgaagtttttacccttcagcaggccgataaacgtctgtggcgcattctctaaaccgtcagtaatttcttcgcggtagtggattttatcctctttcacccattgccccatctccctctgaaactcatggatgcggtgaccataatcctgagcgataataaaaccttgcaagcgaatacgttttttcagcactgtagccatcaacagaggtaaacgatccggaccgggtggtagctctgtagcgttatagctgctcactaatccgcagacgggaatgcgcgcagatgtattaagtaacggtagcaccgcatcgaataccttaccgcccacgttttcataatagatatcaataccttttgggcacgctttcgccagttgttcggcaaaatcatccgcgtggtgatcaagacaaacatcgaagcctaacacctcggtagcatggcggcatttttccgcgccaccggctacccccaccactctgcaacctttaagtttgccgatttgccccaccgtcgcccccactggtcctgtcgccgcagctaccaccaacgtttcgccctctttaggctgaccgatatccagtaggcccatataagcggtaaagcctggcatccctagcacacccagcgaccacgatggattttgcggatgatcgccaagtttcaccagatcatcaccactggatatgtcatagtcttgccatccactgtagcccagcacccagtcgccagactgataatcaggatgattcgactccacgacacggctcaccgtaccgccgaccatcacgccgccaatatcaacaggcggtgaataagatggctcatcgctcatacgtccacgcatatacgggtccagggacaaataaactgtgcgcagtaacacctgtccttcacccggtgtggcgacatcatcttcttcaagacggaaattctccggaacaggtgcgccatgtggacgcgaggccagaacccaacgtcgattacgctgcttttgttgccccataatgctctcctgtgcttttggcatgaatccatcaatagtagcaggctcacgggattggttttgtttgcagccgtcacatcccctctgcaacacgcaataatttcatcgaggaatccgttgcttcgggctgttttcgatagtattgataacatcatcatcattattttattgaggccagacatgtccatccgttttgcccgcaaagccgactgtgctgccattgcggaaatttataaccacgccgtgttgtatacggcggctatctggaatgaccaaacggtggatgctgataaccgcattgcctggtttgaagcgcggactttagcaggttatccagtgctggtgagcgaggaaaacggcgtagtgacgggatatgcctcgtttggcgactggcgtagtttcgatggttttcgccataccgtggaacattcggtttatgtccatcccgatcatcagggcaaaggtctggggcgtaaattgttaagccgattgattgatgaagcgcgggattgcgggaagcatgtcatggtcgccgggatcgaatcgcaaaatcaggcctcgctgcatctccaccagtcgctgggatttgtcgtcaccgcgcaaatgccgcaggtaggcactaaatttggtcgttggctggatctgacatttatgcagttgcaactcgacgagcgcactgaaccggacgcgattggatgaatcagtcgctcacccttgcttttttgattgccgccggaattggtctggttgtccagaacacgctgatggtgcgcatcacccagacctcctctaccattctcatcgccatgttgctgaactcactggtggggattgtgctctttgtttctattttatggtttaaacaaggcatggcggggtttggcgaactggtgtccagcgtgcgctggtggacacttatacctggcttgctgggatcgttttttgtcttcgccagtatcagcggatatcagaatgtgggagcggcgacaactattgctgtactggtcgccagtcagctgattggcggtctgatgctggatatcttccgcagtcatggcgtaccactacgggcgttgttcggcccaatttgtggcgcaattttacttgtggttggcgcctggttggtagccagacgctcattttaatcagaggatggtgccgcctttggttaactgttcgtggcgcgcttccatatcttctttatgcttgcgaccgtgatgggcgatcgctgtgcgcagacgttgctgctgggtgtagcgatcttcccgacttaactccgcgtcatcgctcagggcgattaataattcgttcatatgggcaatgacgctctcttcaatcgcggcatccacgcgcgcgatgacttcatccagatgcgacatactttctccttagccacttgtgaaatttatcgattcatccaaatgatataagtctgcgtggtgccgtcaagccagtgagtaagatttaaaacagtgaaaacaacagcgccaccgggaaactcatcggccatgttgcccccaccagaaaggcgcttaagaaacggatgcgtttcttatcgtgagaaagaaaccaggtgataagaaatgcgattgctgccataaccgcataaaaaacaagcatgtgttgatagagagacatgtacgggcgtccagccagatgaataaaacgcgcgcaaatatgcgtcattttttgacgtgcatcaagttttttcaccagtttgagaaaaaatcatcaaacagcaacttgcccttatccatcttcagaatgagtattattgcggattttcttaacccgtactatacacataggggcaatgataaaaggtggcaaaaatgaatgtttccagtagaactgtagtactgataaatttctttgctgctgttggtttgtttactcttatctctatgagatttggctggtttatttgatgtagtgattttgcacgcagcacgtactgtcagagaaatcagtgctctgacagtacgcaagatcatctcatactcttacgatctgcaatattatccttaatgtttaaccatgacgtggcggacgacggtgtaatcctccagcccataaagtgacatatccttgccgtaaccagaaagtttctgcccaccgtgcggcatttcacttaccagcatgaaatgggtattgacccaggtacaaccatattgcagccgtgcgctgacgcgatgcgccctgcccacatctttcgtccataccgaagatgcaagtccgtactggctgtcattcgcccagttcaccacctgttcttcgttgtcgaagggcgtaacactcactactggaccaaatacctctttttgcacgatggcatcgtcctgtaatgcgccagccagcagcgtcggcgcatagtaatagccattacccttgcgcttttcaccgccagtgatcactttgatgtgccctgtcgctttcgcctcttctactgccttgctgacgcgttcgagatgcgccagcgagcttaaaggtccaagctccgtagactcgtcatctggcgcaccagattttaacgttgccaccgcagcacccagtttttccaccagcgtatcgtaaatgcctttttgcgcgtagatccgacaagccgcagtacaatcctgtccagcattgtaatagccaaatgtacgtacaccttcgaccactgcttcaatatccgcatcatcaaaaacaatcactggcgctttgccaccaagttccatatgagtacgcttaatggacgacgcggtatggctgatgatgtgctcgccggtggcgatagagcccgtcagcgacaccatccgcactttgggatgaccggtcagcggatcacccaccgttttgcctctgccaaacagtatgttaatcacgcctgccgggaagatatctttcgccagctctgccaacttcaacgcggtcagcggggtaatttctgatggtttaagcactacgcagttccctgccgccagcgccggagcaagtttccacgcggccatcatcagcggataattccacggtgcgatagaagccacgacccccaacggatcgcgacggatcatcgaagtatgaccttcaagatattcacctgccgccagaccattcagacagcgcgccgcacccgcgaaaaagcgaaaaacatcgacaatcgccgggatttcatcattgaacgcactatgcagcggtttgccacaattacgggactccagttcggcaaaaacctgaccattttcttcgataacatcagccagtttcagcagacattccgcacgcactttcggcgtggtttgcccccattcggcaaatgctgcatctgccgcgcgcacagcagcatcgacctgctctgcggatgcctcggcaatttccagtaaaacgtcccccgttgccggattatagacaggctgtttttccccttcgccgctaaccagttctccgttaatcagtaacttatgttgcatagcatattcctgtatcagtggttattgaccattgtcgccttcgcgggttagccaccaggcccccaggatcggcaaggttgttaccaacataaccagcagtgccaccacgttagttaccggtacatcacgcggtcgcccaagctgattgagcaaccacaacggtaacgttcgttcatgacctgccgtaaaggtcgtaacgatgatttcatcgaacgacaaggcaaacgccagcattcctcctgccagtaacgccgaactgagattcggcaacactacgtagcggaaggtttgccagccattggccccaagatccattgacgcctcaaccagactccaggaggtgcggcgaaaacgggcgatgacattgttaaacaccacaactacacaaaaagtcgcatgaccgaccacgatggtgaaaaatcccggctccagattgatggttttaaaggcggttaataacgccagaccagtgacaatgcccggcagcgcaatgggcagcagcagtaacagcgaaatggcgtttttgccgaaaaagtctcgtcgccacagcgcggcagctgccagcgtccctaacaccagcgcaattaatgtcgccagcgccgccactttaagtgacagtgtcacggcatcaagaatatcactacgctgtgctgccacgctaaaccagcgcagcgtcaggccctgcggtggaaaactaaacgccgcatcttcagtgttaaacgcataggcggcgattatcaggatgggaaaatgtaggaaaacaacgccgccccaggccgccagtttgaggaaaaacggtgcgcgttcagagtgcatcgaacgctcccagacgtttcacgaacgccaggtacagtgcgatgagaataatcggcaccagggtgaatgccgccgccatcggcatattgccaatcgccccctgctgggaataaaccatattgccgataaaatatcctggaggaccaaccagctgcgggacgataaaatcgcccagtgtgagtgagaaggtaaagatagagccagcggcaatacccgggattgccagcggcagcaccacatagcgaaaggtttgtcgtggacgtgcgccgagatcagccgacgcctgcaacaatgacggcggcaaacgctcaagcgccgcctgaacgggcaggatcatgaacggcaaccagatatagagaaacaccagaaagcgccccagcccggaagttgacagcgtatttccgcccaccgcaggtaatgtaaggaacgcagtcagcagtggttccagcccaagatgttgtaaaaaccactgagccacgccatcttttgccagcaataacgtccaggcataggctttaacaatgtagctcgcccacatcggcaacattaccgcaatataaaaaaacgctttcattttcccgctggtatagcgcgccatataccacgccattggaaaagccagaatggcgctggcgatagtgactgccacagccatagtcagcgtgcggagaatgatgtcgtaattcgccggattaaacagcgcacggatattcgccagcgtcagttccggcgttaccgacatggtgaaatcgtcaaaagtataaaatccctgccataacagtgtcagcagcgagccgaaatagacaatgccaaaccacattagcgggccaagcagcagtaaaaacagccccagccccggattatgccagaagaaaccggacaccttacccagacctggacgtgaaggtgattgcaatacattcatcgccattcacctctcctcaaccagcggcaccatcacatcacgcgaccaggaaaccatcacctgttgtccgggcgtgagcgtggcaggcagttcttcgcctgtcatattggcctgactcacaagcagtttttcaccgccgttcaatttcagttcaaaacgagttgccgcgccctgatattgcaccgcctggatcgtgccattggcctgcagttcaccaggggtgttgaggcggatatgttccggtcgcagggcgaagcttcccgtcatgccacaaagtttctctgccatcagtccatcaaaaacattcgatgtaccaacgaacccggcaacaaacggcgtgcgcgggcgcatatagagatcgcgcggggaatcgacctgctcaatgcgtccattattgaaaaccgccacacgatcggacatcgataacgcttcgccctgatcgtgggtaacgaagataaaagtgataccgagagactgttgcagttttttcagttccagctgcatctgctcacgcaatttgagatccagtgcgccgagcggttcatccaacagcaatacgcgcggttcattcaccaatgctctggcgatagcaacccgctggcgctgaccaccagaaagttgtgacggtttacgttgatgtacaaaccccaacgccactttctccagcgcctcttgcgccattgcgtgccgctgctttttattcacgcctttgaccatcagcccataggcgacattgtcaagaatcgacatatgcggaaatagcgcgtagtcctgaaagacagtattcacgtcccgctcccacggtggcagattgctggcgggtttaccaaagatagagatagccccgccggaaagctgttcgaagccagcaatcaggcgcaggcaggtggttttgccggagccggacggccccagcatagagaagaactcaccatcttttatcgcaatactgacgccatctactgcgcgcacgtcaccgtacaaccgcgagacgttgtcaaactccactgcgtacgtcataaagcaccccagcgaagttagcgaccgcccataatggcaatgtaatcctgcgtccagcgactgtagggaacaaacttgcccccttctgctataggcgttttccagaaggcgattttgtcgaaatagttaaaaccgttggtttcacaacctttttcgcctaataacggactggctttacacccttccggcactaccggtaacgagccaaaccaggccgccacatcgccctgcacttttggcgttaatgaccagttcatccatttgtaggcgcaaaccggatgtttcgcttcgctatgcagcatggtggtatcagcccaaccggtaacaccctccttcgggaaaacggtagcaacaggctggccttcggctttcagggcgttggcctgatagggccaggcactggaagcaaccacaccctcgtttttgaaatcgctcatttgcacggtagtgtcatgccagtagcgatggatcaaactgtgttgagcgcgcagcactttcagcaccgcctggtactgttcttcggtgagttgatacggatcgctgatgcccaactgcggctgagtggctttaacgaacaacgcagcgtccgcaatatagatagggccatcataagcctgaacgcggcctttattgctcttgccgtccggcagattttgctcaacaaaaaccacttgccagctatccggcggcgtcgggaaggttttagtgttgtacatcagcaggttcggcccccattggtaaggtgtgccgtaaactttgccgccaacattaaaccagtcgcctttaaccacgcgcggatcgagcgttttccagttgggaatcaatgcggtattaatcggctgcacgcgtttacccataatcaaacgcagcgaggcatcgccggatgccgtaaccagatcgtaaccccctttggtcatcagactgaccatttcatcggaagtcgcggcggttttcacattcaccgcgcagcctgtctctttttcgaactgcgttacccagtcgtattgtttatcagtttgtccgcgttcgatgtatcccggccaggcgataatatccagtcgcccttccggtttatctaaattggtaggcggttcggcggcgtgagcggtcattattgtcatgctgagcgcacacaggctgctgcgggcaaatgtcttgctcataaggtcttactcctgtcgtaattaattgttcagccgccgtgccgtaaaaatatctccttgtttaaccatagacggcggcttgcaggcacaccttcgcccctgagaaaatttattcaggttgtgagctaccgcgcattatgccgtctgtaaggttatcttctggagtatagtcaaggagttaggaaatatgactgctattcgaaattcatattacccaatctaagaggaattaaattaaacgctattacagccgttcttgaataagtttgcctaattgttttaccgcctgttcttcacgctctccccactgccacgcggtattaaaacggaaaaaacgtgaccagttttcaccggtagaaaacattttacccggcgcaatactgatatgatgcgtcagtgccgccaggcttaattcgccggcatctaacggctcggggagctccaaccagagaaagtaaccactgtcattatgatgaattttcacttccgcaggcagataacgcagcagtgcctgccaggcacgttgtttacgttccgcaagctggcgacgcaggcgacgaagatgggcgtcgtatcggcgcgtggaaaggtaatccaccagcgcaagttgcatcggtgagctggtggaaagcgtactcatcaactgcaagcgttgaattttacgtgcatgttttccggcggcgacccaaccaatacgaaaaccaggcaccagacatttcgaaaacgaagagcaatgcaaaacgccatcgtggcgatcccacgctttcgcaggcagcggtttttcccgtccaaaataaagttcgctgtaaacgtcatcttcaatcagcgttacgttgtactgattgagcaacgccaccagttgtgcttttttttgcggcgttaaggtaaatccgagtggattctggctattagtcatcagccagcacgctttcaccggatactcctgcaacgccagttccagcgcctgaagatctatcccttctttaacatccgtcgccaccgataacgccttcagccgtagccgctccagcgcctgcaacgcaccgtagaaacaaggattctctactatcacccaatcgcccggttcagttaccgcttgcaaactgaggtttaatgcctctaacgccccggcagtaatgacaatttcatcaggagaaatggtgatgccctgtaaggcatagcgacgagcaatagcctgacgcagttctgcgtttcctggcggtaagttttcaatcacgctcatcgctgtggcggttttgcttacctgcgccagcgagcggtttagttgttggagggggaaaagtcgcgggtcgggaaaggccgaggcaaacggaacgaccgacggatcgcgactggcttgcaacatatcaaaaatataagtgttgatatcgactgcttcatctcgagtgactggaatgactggcgctttcggcatttttattgcctgtggcgcaacgtaataacccgactgcggtcgtgcgataatatatccctgactttcgagcaactgataggcatggctgacagtcataaagctcatgcctgaaagcgccacctggtcacgcaacgaaggcaaacgatcgccgggttgccagatacccgacgcaatctgctcgcgtaattgttctgcaagctgctggtattttttcattatcgaatcgtaattatgtgcagatgattcggcagtctatatcagttgttaaaaatgacaacttttcgttaactgtaattaaaccatcaccagcgataactctttgccaagcgcctttgccgcgagctggacggcgtcgatttttgtcgcatgatgcaagttaaataggcgagtaatctcctgtttaggtttgccaattcgcctggctaactcttgctgagtgatttctgactgtaaaaaagcatttaacagcaataccttagaggcgacgctcaaaggtacttcaataaagtgatcgtgactatttaatggcgaaggtaaagggataagctcgttatcttcaaaataaaaatcaaatgcggtcagtaaagcatcttttgccgcttccatcgcttcagcgacagtttcgccctgggtcaacgcttcagggatatccacaaaagaaaccatataaccgccttccggcgcgggtgtaagagtgacgggataacgcataatttcgactgtctctcgcatgtcattaacctttttaattggcgattaactcaaaccgagttgtttcaggattgctttacgcaatggttctttaatctcatcgcaggggtgacgcggcatgacactgcgcctcccatgaaacctgagtttcaaatggttgctgccattcgctacatcgacgccctgagattcgagccaacgtctgaactcgctttgtttcacatcgcctccctgccgctgagtatatcaacaaagtaaacattagtgtttaccttcgtgtgtaatttgctcgaaaatagcactaaatcgccgcaacggcagaatgcaatgcaaaatcaggaaggaagattccagaatttctttgcgctaatttgcaaaactgaataataacctcaagaaacgatcggcatcatagcggcaaaaggtaagaaaaaggtggcaggatgtttacgaaggcgttatcggttgtcttattaacgtgtgctctgttttcaggacaactcatggcagggcacaaaggacatgaatttgtgtgggtaaagaatgtggatcatcagctgcgtcatgaagcggacagcgatgaattgcgtgctgtggcggaagagtcggcggaaggtttgcgcgagcatttttactggcaaaaatcgcgcaaaccagaagcgggacaacgttgagtcatttgatgccggatgcggcgtaacgccttacccggcaggcaatatcatgcagattcaataagttgtgagtaaccagaaaactggcgttttacccttttcgcttcggcaatgttttcagcagctcatccggacttacggatgccactacgcttcccggtaacggcattttcagtatgtgatttttgattttgccaatgacgtgcatctcgcatgggcggcaatcaaactttagcgttaatacttcatcgccgttaaccagttgcattggcgtcgccttccagcttttgatattgcctttcgcctgtttcgggcacagattaaaggcaaagcgcagacaatgcttggtgatcatcaccgggacttcgcccttctcttcatgtgcttcatacgccgcgtcaatcagctgcacaccatagcgatgataaaattcacgcgctttctggttgtatacgttcgcgaggaaactcagatgcgtttgcggataaaccggcgcaggatcagcaaccggtttacggctgccgcgctggtaactggcaagacgcgcagcatccagcatgtcagcagcttcacggcggaactggtttaacagactgtttggtacaaacagcgcccccggcaaattaatttgcacatcgcgggcgtaatagagggtttgccccagttttgccagaccatccttcagattgttcattgctttttcggcgttattggcttcgtcgaactgcccgtccagcgtatgcgtgatgctgacaccctcttcactggtgagggtcagaatcagttgttcctgccagccgcccagttcaatgtctaccgccacccgacgttcgctggaggtttttgtcagtgcctgctgccagttatgatcaagattacggtttagtgggtgatgtggacgaattttgtgcaaatctgctggcatttcattgggccagacgcggtactgattttctccggttttctcgaccgtattggcacgaaaaccgacgacttcacgtttaatcaacacgttcaggccatcgccatttgccagtggctcggtaacggcaacatcgagatgatctttcgccactttcactacttcgcctaccggcaggccgataaatttcggcgaatcgaacgcgccaatatcgcctttacgggcattcacaaaataatctgtgctaccacggtggaaagtcttttccgtcgatggaacaaagaaatgttcagtacgacctgatgaagcgcgcgccagatcgccacgttcttcaataatggcatcaagcatctggcgataatgggcggtgatattcttcacgtagctcatatctttgtaacgcccttcaatcttgaaggagcgtacaccagcatcaatcagcgcgccgaggttggcagtctgatcgttatctttcatcgacagcagatgtttttcataggaaaccacccgcccctgatcgtctttcaatgtgtatggcaaacggcacgcctgcgagcaatcgccacggttggcgctacgccctgtttgcgcatgagaaatgtagcactgacccgaataggccacgcacagtgccccatgaataaagaattcaatggtcgcgtccgtagcctggtgaatcgcgcggatctgatcaagattcagctctcgcgccagcacaatctgcgtgaagccaacatcagagaggaacttcgctttttcaactgtacgaatgtcgcactgcgtactggcgtgcagttcaatcggcggaatatcaagttccagaatccccatatcctgaacaatcagcgcatcgacaccggtctggtagaggtcagtaatcagccgttgcgcgggttccagctcatcatcatgcaaaatggtgttaagcgtgacgaaaatttttgcaccataacgatgggcaaacggcaccagctcggcaatatctttcaagctattactggcattatgacgggcaccaaaaccagggccgccgatataaacagcatcggcaccgtgcaaaatagcttcgcgggcaatggcggcatcgcgtgccgggcttaacagttcaagtcgatgagaagatacggtcacattcttatccagtagctgaaaaatggcggctattttagccacaagcgcgacgttgcgaaatagttttcccgcttaactgcgcgggtaatggatgagggaatgaaaatgtacggtttgctccccaccattacgatagatatgcgtgacgtctgcagcaaatcgaacgccttccccacaattaagggtctgccattccccatcaacgcacagatcaagttgtccatcaatgacgacgacatgttcgattacccccttctcatggggcgtcgattcgcttattgcaccagatgccatctgaatcgagaagtgttcaaagcagagttgtggatcataaggaaacagcgaagtgatcaccatcgcctgctgttgtggatcataaactgaaggcgtagcggactgcggcggagaaataaatgttgaaaatggtacgttcaacccggtggcaattttccataatgtcgcgaccgtcggactggactcattacgctcaatctgccctaacattgctttagaaacgcccgtcgcttctgccagtcgcgaaagactccagccgcgctgctggcgtagttgtttaagtgtggtggataaaaagcgagcgagattttccatgcgactcctccggcaaaacggaagtttatcacttgtgcgttataacggacaaatgctacggtgcctgtacgctataacgcacgaggtgactatgcgtctgttttctattcctccacccacgctactggcggggtttctggcggtattaattggctacgccagttcagcggcaataatctggcaagcagcgattgtcgccggagccaccactgcacaaatctctggctggatgacggcgctggggctggcaatgggcgtcagtacgctgactctgacattatggtatcgcgtacctgttctcaccgcatggtcaacgcctggcgcggctttgttggtcaccggattgcagggactaacacttaacgaagccatcggcgtttttattgtcaccaacgcgctaatagtcctctgcggcataacgggactctttgctcgtctgatccgcattattccgcactcgcttgcggcggcaatgcttgccgggattttattacgctttggtttacaggcgtttgccagtctggacggtcaatttacgttgtgtggaagtatgttgctggtatggctggcaaccaaggccgttgcgccgcgctatgcggtaattgccgcgatgattattgggatcgtgatcgtcatcgcgcaaggtgacgttgtcacaactgatgttgtctttaaacccgttctccccacttatattacccctgatttttcgtttgctcacagcctgagcgttgcactccccctttttctggtgacgatggcatcgcaaaacgcaccgggtatcgcagcaatgaaagcagctggatattcggctcctgtttcgccattaattgtatttactggattgctggcactggttttttcccctttcggcgtttattccgtcggtattgcggcaatcaccgcggctatttgccaaagcccggaagcgcatccggataaagatcaacgttggctggccgctgccgttgcaggcattttctatttgctcgcaggtctgtttggtagtgccattaccgggatgatggctgccctgcccgtaagttggatccagatgctggcaggtctggcgctgttaagtaccatcggcggcagtttgtatcaggcgctgcataatgagcgtgagcgagacgcggcggtggtggcatttctggtaacggcaagtggattgacgctggtcgggattggttctgcgttttggggattaattgccggaggcgtttgttacgtggtgttgaatttaatcgctgacagaaaccgatattgacatcctccacgccctgaaggacgtggatccctgctacgttcaggctgtcgcctgaatcatttcggtgggttcctgcttcaacgggcggcctgactgcaccatctctccacaggcaagaacggcgtgccccgccgctaaaatgttgcgagcgccatttacatcggcgttcgctgtatatccacatacctggcatctgaatttactttgtgacaggcggttctctttcgctgtatgaccacagtacgcgcaacgctggcttgtatacgctggcggaacagcaagcacctgaccgccacgccagagctgcttgtacgcaagctggcggcgcatttcataccagccctgatccagtatcgaacggtttaaacctgattttgcccggacattgcgccccggctggctgaccgtacccgctgctgactttgacatgttgctgaccttcaaatcctcaatgactatcattgcgtggtttttgctgacggccgttgtgactttgtgaaggtagtccctgcggatatttgcgatacaggaatgcagtcgctgtattttgcgtttctgcttttgccagttgttgctgaatttgaccttgcggcttaactgtcgctgaagtctcgccagcttcttctggtttttctgaaaactgtttacaggctcaaagactgtgccatctgacagcgtggcgagtttagccacgccagcatccagcccgaccattgatgctgaagggtgaaccggagttgatacttcactttctgtctgaatactgatgtaccacttaccgcaggactggctgacagtgacatttttcacaacacccgtgacctgacggctgttccggtagcgcatccagcccagtttcggcagaaaaatacggctgttttcctgatcgagcttaacgccctgcgggtagcggaatgcatcattctgtccccgctttttgaatcggggaaaagcagcccgcttccggaagaagtttttgtaagcccgctcaaggtctttcagtgactgttgcaatggctgtgagggagaatctttaagccattgcgtttcagtggcatttttccactcaaccagccaggaagccattttcccgtaagggatgtatttattaccggcctcatgattctcattctgacgtgccagagcacgattgaaaacgaaacgacatgcgcctgcgaagcgcctcatttcacactcctgttgaccaccgggtcttaactggaatttaaatgcctgtaatcgtttcacaggtcaaatgatactttggtctgtgaaaaaagaaaccgatatccggcgtggaaggcattgtgttttcctgatgcatgttcacctgctctttgtcaccagataccgacgccagatttttgaccatgacgcgacagaaaaactacgcacttacttttcaaatgtatgtgctgattttgaagctgaactggttgaaatggatggcgaaccagatcacgtccatttgttaattaactatcctcccaaactggcgatatccagtctggtaaacagcctcaaaggcgtatcgggtaggtgactgcgacgagatcgaccagatattgcattcaggtattactacaaaggcgttttgtggagtcctggctattttgccagtagctgcggaggtgcgccaatatccgtcatccgccaatacattgaacaacagcaaacacctggtcaggtggaaaaccgcgccttatatccccgccctgaaggatggggttttacggcgcaccggataaaaagcgccatctaacgatggcgcgtctggaactactttttgttaacgtcaaacatggtggcatcggtcgccatgtcatcaataacttgtttaatattttcgaaagccattggcgtactttcgttattcaggtctttaccttcgccctgacgaacgactttgataaccggtttattagtcgctgcatcaatcagctcaccttcaaaatagaggcgagtatccatggtacggtggcctgtagccatttgcgtccccgcaaccactaatgcaacaggaaccacttcatagaattgcagcccttctttgctggtatctacaccggtaatggccccacggaaaatcagactacgcggcccagcggtggtaaccagtggtttacgctgcgctatcgcttctttcatttcggtgttggtatagttcaaaattttatccagaactttctgccctacctgggtcgacggtttcggtaccggataataagtgattgggttccagacgatgctgtcatatttgctttgatcaaaactcgggtctacccaacgtaaaacaggtttacctgtagccgaggttgtttcttttaaatcagagtaattgtttaaaaaaccagaatatttatctggctgggtgattttagaggcacaaccagacagagccaataagccgcataaagctgcaactttcgcaaatgatgtggtacgcatgaatagtttcctgagatgattatattactttctaagttatagcaaaaagcgccgcttcgtgttgtggcaaaaaaagtgttggtgaaaataaatttttcagccccttttcagacgacatagtcaatgccgaaaaaggggctaagtcaatcatcagtacttaaatttcagtaagttaagctgctaaaaacttcgactactgtgattaatttcacatcccttcgataaaaaatatgcttaccgaaaagaagaacagtaaatcatctcagcgtggggaattttcacgcgttttgtgcttaccgggtcattttttacgtgccagcatcgtggcgaaacgcagtttaatacgattaccgttggcgtcggtgcggtgcagctcgccgacgtcttcattgtatttcaccctctcccagccttcgtaatatcgacgtaattctccctctttgaaggcaaacgggaagccgacggtacatggataatcagcggtatccatcgccgccacaatcaggttgtaaccaccaggtttagtgcaacgttgcatattggcaatcaacccggggatggttttagcctcaaggaacatcagcaccacagtcgaaagaataaaatcgtactgtctatcaaatgtgaggttattcagatcaacgactcgggtgtgtaaattatccagattttcaatggatttaatgcgctcgacgttggcgatactcatggcatttttatcccatgcgtcaacatcataaccattggctgccaggtaaagactgttacgaccattgccacagcccagatccagcgttttacccggtttaaccactttcaccgcttccagtacttcagagtgtgtgcgggttaattcatatttatcagtaaaatagttttcgtcacgaatgatcattctttgtcctctgctttcattaaaacggcgcgctcggttctgactaacaattttccctgcatcagaagcgcaaaagtacggatgagcagtattgcaataataaaattggtaaagataaacagcggcaccgccagcgtatggaaaaatccattatcgctgccactccccagatgcaaaccggtggttgccagtgcagatacgccgaacgagaaactccagaatgaagcattaaatggctgggagagataccatggcatcagacgtagcataaacagcagttgcagcagtccataaccgaaaagcattttcgccagcgtgtcaccctcgccgccgttgacgctcagccaggcactacaagccaccagcgcaggagcgagctgaatgccgagtgatgtccgcagtgccgtgggtaattctcccgaactgcgcagacgctgcaagatcaccggttcaaggcttagccatgagaaaacgcctgcgcctaaaaacaccagaccggcgtcggtgtagcccaacgcaccacaggccattgcgctgataaagttgttggcaactgtcggcagatacagtccaggcgtggtagcttcttcagggtgagatccgcgccataatcccgcagtttgccaggcggcataagccaactgaaccacgacaccaaaactgaacaggcacaccgccagtgggcgaaaccacggaacaaaaccaatcgccaccagcatcgtcgttgccggaaacaaactcacaaaactgctcagcactggatggcgaacttccgccagcacgctatgcggaaagcgtatgagtcgggcaataaatgcgctagtcaataatccccagatgatcatcgccagaatcaccagcccatcccctaaccagtggctgacctgccaaacctggctggcatagcgccaggcaaatcccatccctatcgtccccaacacaataccaaagtagcctgccggcaaattgagcactttatcgctctgcatcttcttactcattttgtttaatttataaagtatatttgaaatgcattttatggaattttctcgagcatagccagagccgcagaatttgctacggttatagtaagtcacctgtgggaaaacgctatgcgcaaatatcgtctaagtgaagaacagcgagcctttagttatcaggaagatggcactaaaaaaaatgtgttattacggcagattatcgccattagcgattttaacgatgtgatagcaggaaccgctggcggctggatcgatcgcgaaacggtgttagcacaagaaggaaattgctggatttacgaccagaatgctattgcgttcggcggagcggtgatttccggtaatacgcgtatcaccggcaccagcgtgctgtggggagaggtttacgcaacggataacgtctggatcgataatagtgaaatcagccagggtgcatatataagtgacagcgtcaccattcatgactcattagtttacgggcaatgtagaatatttggtcacgccttaattgatcaacattctatgatcgtcgccgcacaaggcttaacgcccgaccatcaactcctgctccaaatttatgatcgcgcaagggttagcgcctcgcgtattgtccaccaggcacaaatttatggcgatgccgtcgtccggtatgcttttattgaacatcgcgccgaagtttttgattttgccagtattgaaggtaatgaagagaacaatgtctggctatgcgattgcgctaaagtctacggtcacgcgcaggtgaaagctggcatagaagaagatgccattccgacgattcattacagttcgcaggtggcggaatatgccattgtggaaggtaattgtgtgttaaaacatcatgtcttggttggcggaaatgccgtggtacgtggcggaccgattctgctcgacgagcacgttgtcatacaaggtgagagccgtattacaggtgcggtgataattgaaaaccatgtggagttaaccgaccacgccgtcgttgaagcctttgatggcgacacggttcatgtccgtggtccaaaagtcattaacggcgaggagcgcattacgcgaacgccgctggcagggttattgtgaatcgataatacgcgcgtataagttcacatcatcataggcatcattcaggaactcagcctgtttcaggcaaccttcaaggataaaaccattgcgcaaagcgacctggttgctttgcggattgtccacccgacatttgatcacgaagcgtctaagttcaccagactgggcgtaatgatgaatcaatgcctgcagcgcctgagaaatgatcccctgcccctgatgagattcgtccagccagtagcctatttcagcggttttattcagtggttcaatacgattaaacgagataacgccgataagttcatcttctttgaaaatcatgaacattttggcatagccgcgttgatgcaacatcacattaccctgcaccgtttttcgcgtgtcctcttcactttgaacaaactgcggccagtttagcgactgctgtaaccaggttttatttttacagattaactgataaagaggtttgacgtgattttctgcaacagcatgtaattcaagtgattcgcttacttttatcgtttcagtcatcttatctccagtcaatccatgcagttgttaaaaaagccgcctggctggcggcttaggaaagtttacacctctttgacgctctcctgctgcaggattttgagcatctcatcttttaactgtagcttttgttttttcatgcggaccacttccgcattgtaccctcgaccgtcggaaccttcctttctggcaatttcatgatcaagtttattgtgtttatcgaacaaggacataaagcgaggattttcgtttttcagacgggatattaaatctcggtattctggaaacatacgcactccctgttagtggctgacaaggtgtatctgaaatacacaccatcagattactcatttaacttagggaaaaatgcgagcgggatcgtgtttaaccagacggcacctcccgaagaaggtgccgaagaaaaaacgattaactcatcacgcggtcgtcaacatactgacgtttatccggcgctggcgggaaatactgatacagccatgtttcactgatagcgtccccctgacaacgtagatacatccgcatatcgaccggatcagtggagtccgaagtcggataccagtcaaactgaatacgataaccatcgatgggttcaatatagagaatttcgatttgcttcgcttccccactggaaagcgtaatcaccggctcaatgccttttggcgcggcagctttcagatcaccaccaacgaaatcgacggcaaaacgacgcgcccatttttcgggatagtgttcacctggcgcccaaccttccgagaaaccgcccatgccggtacgcgtcgccataacgcgcgctaatgggcaatgaacaggcggttgcgcactccagtacagacgatactggaatgcaaactcatcacctgcttttacagctttttctggctgccagaagcagacaatgttatccagcgtttcgcccgttgttgggatttccatcaggccgatggtgcccttaccccacttgttacgaggttccacccacagacttgggcgtttgttataccagcccataatgtcctgataatgggagaagtcacgatccagttgcaataaaccaaaccctttcgggttgttgtcggtgtaagcattgaactgcaatttttgcggattattcagcggacggcaaatccactcgccgttgccccgccacatggacagacgatcagagtcatgaatttgcggatgaattgtatcgcacatccgacgttcattagtaccgcagctgaacatactggtcatcggcgcaatgcccagctgtttaatgtctttgcgcgcatacaggtgattttccacatccataatcacctgacttttctcacaatggatagtgaacttataggcaccagtaatgctggcgctatcgagcaacgcataaacggtaaaggtagttgcccccggttttaccgtatcaaaccagaaggcggtaaagtcggggaactcttctttactgtcggtgtaagtgtcgatcgccaggccgcgggccgacaaaccgtattgatatgtatcatcaacggcgcggaaataactcgcgccgagaaatgatactacatcacggcgcgccagttcgggggctttaaacacgcgaaaaccggcaaagccgagatcgctttgcccttctaattgttttgtatcaacacctgcatcgttgtatttgaacaactccgggcgaaagtgaatttcacgcgccagatgtgttgctggatctacagaaaacatacgaacgcggcgacggaatcccattcccatatggaagaactgagcgtccagttgacggttctcaacgttatgccagagcgatttttcggcgtcgtattgaatactgttataagcctgcggcgtcattgtcgccagcgtgtcaggtaacggacgaggcgcaccacgccacgctgtttgcgctaagtcgtgcgccattgactgtagaatggagaagtcaaaacgctgggtttgcccgtcggcaatatcagaatctgccgcgaatgccgcctgagaaaaaagagaagcaatgccgctggtaccgcacacggcggccatagccattgaacctttaataaatcgtctacgatccatacctgaaagtgagtccttctggtgttgtgaatggtcccgcgctggtcgttttcagcggcaagaaagtgcttatttatgaccgctcactctagacaatatttattaataatccaattgttgaactgagagaatatgcataaatcggcattttttttatgtcgatgggatgagcctgattcgtttgtaaaatcaggcaaatttttgcaaaggcggatggtcagattttaaagcaaaccacagcgacgtttactgcgttcttccgcttcctggtaaagctggaactcatccaaaaccggacaacccaacgcctgctcaaatgcttcgcgactggcattaccgtgactgcgtgtctgcgtttcattacccagatttgactggaagatccccgccgcgctaacgggcaagaaatcttcataggtgatgggttgcgccactacccaaccacgttcaattaagggctgtggatcgtctccaggatgaatcgcctgacgatgcgcctcacccgaaggcgtcagacggtaccggaaccatgccaacccttgctgacgcattaaaaactcactgtcaggaaaagtgcggaaggtttcctgtaaatgcatttggtgagtgagattatcctgcccggttccagcgttacgcagaagatcatcatacagttgtcgccctttcggcgttaatgccacgccacgctgctcaatttcaccaaagcgcgcggtatgcgtgccctgtttctgccccgcaaacaacaccgtctcttccagtgctttaaagctggtctggcgtagtaaaatcggtacctcgcggcgcggcggcccctcgatgagaattttgggttcaattccgcattcaggcatcatcgactgcacccggtcaatatccagcgtacgtggcgtcaggtggttgatatggcatccaggaaaacagaccacatcagcaatcaaccgatgttcgttgtgcaatgcgcgataggtttcttcatctaccgttgctgactggtgccagcgaaacgtttccagggcttcctgcacaaactcctgtgcctgtgtttcgttaaaaccgccctgctgctcatattcctctaacagttgtcgacaacgtggggtgaagatatcgcgctgacgcagaatctccgccgctttctggcgcaaaatttcgttctcgataagctcaaggcggagtaaggaggtaaaaacgcggaagggattacgcgccagagaagcatcatcaatgggccgaaatgctgtcgaatgtaccggcacccctgcctgcgagagatcgtaatagctcaccgggtacatccccataatggcaaacatccgccgaagagtagcaagctcttgtgcagtcccaacgcgaatcgccccatgacgttcaacattcagtcgcgccagctcgtctgcatttaccattttttcgtgcagttgaggattgttttccagcacagccagattcacatcagctaccagttccagcagcgtgccatattgcggaacttcttgctggtacatggctgacattgcctgcgaaaactgttcccgaatctcatccgccgtgatgctgttcgccatagtgtctgcctccagtggtcagtaatctggagtgtaggtaaccgcattcactcttgcgggaagaatttacaaactgtgatctcgccgcgaaaacatcaatattatccattttgctgtaacataattgctttaattgttaataatattttgcaatcaagttatcataatcaaacaacttcacttgtcagcgacaccgcttcgtttttaacatcgcttatggaaaaaaatagtctgtttagtcagcgcatccgtttgcgccaccttcatacattcgtagctgtcgcacaacaaggaactttggggcgcgcggctgaaacccttaatttgagtcaacctgcgctctctaagacattgaatgaactggagcagctgactggcgctcgcttgtttgagcgtggtcgtcagggggcgcaacttaccttacccggcgaacaatttttaacgcatgcagtcagagttcttgacgccatcaacactgccggacggtcgcttcatcgtaaagaaggtcttaataatgatgtcgtcagggttggtgcactacctactgcggcactggggatattaccttcggttataggtcagtttcatcagcaacaaaaagagacgaccttgcaagttgcgacaatgagtaaccctatgattctggcgggtttaaaaaccggggaaatcgatatcggcattggtcggatgtcagatcctgaactgatgaccgggcttaattacgaactgctgtttcttgaatcgttgaagctggttgtccgccctaatcacccgctacttcaggagaacgtaacgctaagccgggtgctggaatggccggtcgttgtatcaccagaaggcactgcgccacgccagcattcagatgcattagtgcagagccagggctgtaaaattccttcgggttgtatcgaaacgctgtctgcttcgctatctcgtcaacttacggttgaatacgattacgtgtggtttgtcccttctggcgctgtaaaagacgacctgcgtcatgccacgctggtggccctgcctgttccgggacatggtgcaggcgaaccgattggaatactgacccgcgtagatgcgacgttctcttctggttgccagttgatgattaacgctattcgaaaatcaatgccgttctgaaaggtgaagggatctgtcgatccctccttgaacattttcacaccgtagcgaaactaactggttcacccgctccgcgaggttctgccgacacagaatgtttgtgcagacggaatacatccaccgcctcagttaatcgtgccgcctgttcttcaagggacaccgccgccgctgaggcctcttctaccagagaagcattctgttgcgtcaccttatccatttcagaaatcgcctggctaacctgcgttatgcctctactttgttcatccgaggcggcggcgatttcctgcatgatatgtgtgacactcgcgacggcatcaacaatagtgctcatggttttcccggccgttgccacctcatccgaccccaggtcaattaacctgactgattcactgatcaagccttcaatctctttcgccgcctgagcgctgcgacttgcgagtgtccgtacttcgctggcgacaacggcaaatccacgcccttgctcacccgctcgcgcggcttcaacggcagcattcagtgccagaatattcgtctggaaagcaatactgttgatgacggcggtgatctcagaaattttcttcgaactcgtggagatagcgcccatcgtttttactacaccggaaaccgtctgcccgccatcgctggctttaatagaagcctcttgcgccagtttgctggcatgatgcgcgttatccgcattctgtttcaccgtcgcagtgagttgctccatgctggcggcagtttgttcgatagccgccgcttgttcttcggtgcgagatgacaggtccgcattgccagctgaaatttcgctggtgccacgataaatctcttccgcgccctgtcgaacagtccctactgtcatccccagtgaatgctgcatttgctgtaaatgacgacttaagcgaccgatttcattacgacccgccggttcatcattcatcgtcagatcgccactggcgattttttcaatccgttgtgcggcatgttgcagtggacgaatgacgatccgacgtagcaccataaatgttatcagcgtcatgaccagggcaagcacaaacgcgccaatcatgaacatcccacccaggcgggtgcgctgatgggccagttccgccagttggttggctctggtgctacgtatcttaacggctttgttcaaaatatcggtataagcattatccagcggtcggatctgctcactttcatgattgataatcgcttcaaacatgccatttttggcatatttcaacataggttgcatacccgtgatataagcctgaaagcgttgatttaattcagtgtcgagggcttcatcagcaggtgttttcaccggtcgattctgataagcacgataaccttgctgcgactgtttaatctccgattcggcttgcgcaatatttcgcttcattgcttccatttccgcaatacgactcgcagccccggcctgaatcatattgatccgggctgaacgcaaaaaatctgaactgttcgctaacccggtccgaatctcaatctccgcagtaacatcacgctgatcgcgatcggcctgccagaggaaatagccagccagggctgaacttaatgcgaatagaactaagataccgcctagaatgcaggcaaataacggaaccaacctgatgtgatgcaaaaaacctaatcgctgtgagggagttgtattcattaccgttgtctctcgtccaggtttactcctgatagaaagtcatcggcacttgacggtaattacttatgaccaaaaacctctttgcgtcacatttttacaacaattattgcatagaaaattaatgctattggaatgaagagagtaacgaatggctaaactggctaacccgaatgacgaaaaattctggaaaacagcacgcaatttcgtgaagtgattattttcgtccctaaggaaacctcataggatgcctgcgggtgcctgagactttctgttttcaggctaaccgggaatcagaaagacgaaggccccgaccgatatttctatcaactgtactgcacccattttgttggacgatgaaatggaatagcccctaatatgtcaaatattcaaggcagggttaagacgtaagatgcgaaaagcagccatggacagaaactacctggcgtcagtccttacggggagcgggctttcgtaatcttgccctgggcattattgtcgtataaacgctttaccggacacatgacattcacaatgtgtgttaattttactgacatctttcaaaaggagcgtaatcatgccgcacatcgacattaaatgttttccgcgtgaactggacgaacaacaaaaagcagcacttgctgcagatattaccgacgttattattcgtcatctgaacagtaaagacagttcgataagcattgctctacagcagattcaaccagaatcttggcaagctatctgggatgccgaaatcgcgccccaaatggaggctttgataaagaaacctggttatagcatgaatgcttaacccgccgtaacacgcttgccgctggtaacaaacgtcccagcacctaaatgatgcaacgtattgagcttatcatcatcaaactgccagcggccttcgacaaatacccgtgcgtctgccgctgctgatactacttcgccaaacagcgtgtcgtattcttcttgcgcagaagtcgcaggtagcaatcgacactccatccacgccagacatttttcctcgaccagaggcaaaccaaataccgggcctctcacaaccggaatgccatagcaattaaatttatcttcatcacgccccgacacacttcccaccgcccacgtccagttagttgctgcaacgcccgggataacgatgccaaatttaccgttatgttcaatcaactccctggtccatgtcgatttatctaccacaatcgccacgcgtggaggttcaaactccaccggcattgaccaggctgcagccataatgttacgccgctgggattgctcatcgaaactggtgatcaagaccgttgggccatgatttaacagacggctggcatggtgtaattctatggggatgaatcggctcatggtatcgcctcgcgaagaaggtttttttaagcgtagtccgtaacgcaataagtaacgaaattaacgggattggcgatttgcgaacgtgatgcatgtccgcgatcgcacaaaatagccggtgcggcgtctattccaggttataagttgagaaaaccactaagggaaacgcctgatgacgcccattctgaatcactattttgcccgtattaactggtcgggagctgctgcggtcaatattgatacgcttcgtgcattgcacctgaaacacaattgcaccattccgtttgaaaacctcgacgttttgctgccgagggaaatacagcttgataatcaatcgctggaagagaaactggtgatagcccgtcgtggcggttactgttttgagcagaatggcgtgtttgagcgggtgttacgcgagctggggtttaacgttcgcagcttgttagggcgcgtagtgttatcaaatccgccagcattaccgccgcgcacccatcgtttgctgttggtggaactggaagaggaaaaatggattgctgatgtcggtttcggtgggcagacgctaaccgcgccgattcgtttagttcccgatctcgtgcagaccacgccacacggagagtatcggttgttgcaggagggtgatgattgggtgttgcagtttaatcatcatcagcattggcagccgatgtaccgcttcgatctctgcgagcagcaacaaagcgattatgtgatgggcaatttctggtcggcgcactggccgcagtcgcattttcgccatcatttgctgatgtgccgccatttgccggacggcggcaagctgacactgaccaattttcattttacccattatgaaaatgggcacgcggtggagcagcgaaatctaccggatgtggcgtcgttatatgccgtgatgcaggaacagtttggtctgggcgtggatgatgcgaaacatggctttactgtggatgagttagcgctggtgatggcggcgtttgatacgcatccggaggcgggaaaataatttatgtcaggttgccggatgcggcgtaaacgccttatccggcatacattaacccggttgtagacctgataagcgaagcgcatcaggcaacggtttcagagtttaattgcccattcggcatgaaacaaaatcaccgccgcgccagaaatggtgactttttccggttggttatcacgaattgtcaccgtcacttcaatcacgccgtcacgccccaatgcgcgcccctgattgcctttaacacgcagcaccttgccatcgtggggcaatacgttgtgatgtaccaaccatgcacccatcgggccattggcattgccagtcaccggatcttccacaataccaatcgcaggcgagaacatacgaccatcggtttcgtttttgcctggacggatctggaacgggaagaaaccattgcagccaatctgtttactgatagcggtcagcgcattaaggtcaggcgaaagagcgtcgatatccacttccggcttcaatgggatcatcactttagaatgcccggtcgtcgcgacctggatcggcaaacccggcagaatatcgtcttcagtaagatgcaatgcgttgataatcgccgcgcgtacttcaccctccagcggcagttcaaagcccggcgtaccttgttccagcgaaatacgataatcatcgttgtgcttttcgatagtcacgcgatgttttcctgccagcgatgtttgccagatcgtgcaatttcctaaacctaacaccttcgcacgtacatagtgcgcagctactgtcgcgtgaccgcaaatcggcacttcaaccgttggcgtaaagtagcggatgcgcacatcgctgtcgtcgctgtgcagcagaaaagcagtttccgaatggcctaactcgcgggcgataagctgcatttgcgcttcgctaagattatcggcggggaaaacaacaccggcagaattgccgcgaaacggttgtgaggtaaaagcatcgacgtggtacacctgcggtttcattaacgttctcctgtgactggagaactatcatagcctgcaagtggccggagagcgaagggctatccggccagggtgaaattatcgccgcgaacgcacaatttgatatcgacgagtaaagtactcaaacggcgcgctccacacatgcaccagtcgggtgaacgggaagagcaggaagatggtcattcccaacaccagatgcaggcggaagacgaacgctacgccgttgagcatctctgacgatccaccacggaaagtgacaatgctttgcgcccaacccaccagcttcatcatttcgctaccatcaggatactgtgctgaaaacggtatggtacttagccccaacagacactggaccagcaaaatgctcatgatgatgatatccggcgtagtggaagtggcacgcacgcgctgatttgtcagcctgcgccacagcagtcctgcgccgccaatcaacgtcaacacaccgcaaataccgccgagcaccatcgccatgagttgtttcgctgccactggcaaaaaccacgcgtacatccagtgcggcgttaacatgccgaacaagtgcccgaagaaaatccccaaaatgccgatatggaacagattcgaccatatcaccatcccgcgtttatcgagcatttgacttgaggaggcgcgccaggtgtactgcccgtagtcgtagcgcagccagctgccgaggaaaaacaccgtcgcacaaatgtacgggtagatatcgtaaaaaaagacgttcagatactgaatcatttcccacctcccgcactgatgtcgacatattgcggcgcgacatcctggctaaagcgtcgctgatattgattaagcggcgagctgtcacacgccgtggcgttatcttcaataaacttcacctgttcctcttcccacactgcatcaagcgcctggcgggtgtcatcgcgctcttcgctgtttacttgttttgtgacactgtcacttgaaagggagcttcccgccagttgcagcagagcatcaaacaacgcgtaccacggtgcctcgcgttgttttaagcgaccgccaagcagggcgaggatcggcgcaacattgagcaatccttctttcgcctgatcgtcaggcagtacgcttaaatactccagatacagcggtagataatcgggcagttcccgacaatccagttgcaggccgaccttttcatactccgccagcaggtccaccattgcctggccgcgatcgcgggactcggcatgaacatgttcgaacagcagcagcgatgtggtacgtccacggtcaaacacttcgcaccattcggcctgtttatccagcagcggcgcgttaagcaggttgtgggtgaaatccgtaagcatcggcgcgtcgcggcggatcaacgccagcgcgtcctccttgcattcccacaacagctcgtccggatactccatcaacaggccgatcactttgaggatctgcattattcgccctccgctttgtcgcgcacttcggtgatgttgatggcatcgatacggctactgttgaacaggttgaatttactgtccgaaccgtggcaaccgtcgccaaaggtaaaaccgcagccgttgcgttctgcgaaggcatcgcccgccatttcccgatggctggtcgggataacaaaacgatcttcatagttggcaatggcgagatagcgatacatctcttcgacctgggcgacgctcaggcctacttcgtcgatggcacgagtatcagtaacgccttccacggtttgtgaacgcatatagtggcgcatcgccatcatccgtttcagcgcccgcagtaccggaccggtatcgccggcactcaacatattggcgagatattgcaccggaatacgcaggctttcgatggcgggcagcacgccttcgcttttcggcaaaccgcccgcatctgcgtaggactgaatcggtgacagcggaggaacgtaccagaccatcggcagggtgcggtattcagggtgcaacggtagtgccagtttccagtccatcgccattttgtagactggcgaacgctgggcagcgtcaatcacattttgtggaataccttgtttcagggcttcctcgatcactgagggatcgtgtggatcgaggaacacttcgcactggcgttcatagaggtcaacttcgcgctcggtgctcgccgcttcctcgatgcggtcggcgtcgtaaagcagcacgcccagataccggatgcgacccacgcaggtttctgagcacacggtcggttgaccggactcaattcgtgggtaacagaagatgcatttttctgacttgccgcttttccagttgaagtagatttttttgtacggacaaccgcttatgcacaaacgccagccacggcatttatcctgatcaatcagcacaatgccgtcttcttcgcgtttgtagatagcgccgcttgggcaggtcgccacgcagctgggattgaggcagtgttcgcacaggcgcggcaggtacatcatgaaggtgttttcaaactgcccgtacatctccttttgcatggcctcgaagttgcggtcgcgggcacgtttttcgaactcaccgcccagcagttcttcccagtttggcccccagatcactttgtccatccgtttgccgtcaatcagtgaacgcgggcgagcagtaggaatatgtttgccttccggtgcgctatgcaaatgttcgtagtcgaaggtgaaaggttcgtagtaatcatcaatctgcggcaccaccgggttggcgaagattttggttattacgcccatcttgttgcccagacgcgggcgtatcttgccattcacatcacgcacccagccgccttgccactcttcctgatcttcccagtttttcggataaccaatgcccggtttggtttcgacgttgttaaaccatgcgtactccatgccttcgcgtccggtccagacgtttttacaggtcaccgaacaggtatggcagccgatacatttatcgagattaagcaccatgccgacttgcgaacggattttcattttttcgcctcctgtacctgatcgcgaccttcatcatccagccagttaacgttcttcatcttgcggatcatgatgaattcgtcgcggttcgagccgacggtgccgtagtagttaaagccccaggccagctgcgcgtaaccgccaatcatatgcgtcggtttcgggcaaacgcgggtgaccgagttatgaatgccgccgcgcatgccagttacttccgaaccaggaatattcataatgcgttcctgggcgtgatacatcatggtcatgcccggcggtacacgttggctgaccaccgcgcgggcagtcagcgcgccgttggcgttgaatacttccacccagtcgttatcgacaatggtcagttctcgggcatctgtttcgctgatccagacaatcggtccaccgcgagagagcgtcagcattagcaggttttcactgtaggttgagtgaatgccccatttctggtgcggcgtcaggaagttaagtgctttttccgggaagccgtttggcggtatctggcgcatctcactgacgctacgggtgtcgataggcgggcgataagccaccaggctttcaccaaaagcacgcatccacggatgatcctgatagagctgctggcgtcccgacagcgtgcgccacggaattaactcatgaacgttggtgtatcccgcgttataggatacgtgatcgctttccagaccggaccaggtggggctggagataattttacgcggctgcgcctgaatatcgcgaaagcgaatcttctcgtcctctttgtgcagcgccagatgggtatgttcgcgcccggtgatctcgcccagcgcctgccacgctttaactgcaacatgaccgttggtttctggtgccagtgccagaatcacttctgaagcgtcaatggcggtgtcaatcagcggacgcccctgcgctgggccatcacgcttggtgtaattgagtttaccgaggaaatcgatttcatcctgcgtcttccacgaaatccctttaccgccgttgccaagtttgtccatcaatggcccgagcgaggtaaagcgttcatacgtagcagggtagtcgcgctccaccgccacaatattcggcgcggttttacctggaatcagatcgcattcgcctttgcgccagtcgagcacttcacacggctgtgagagctctgccggagagtcgtgcagcagtggttgtaataccacatcggtttctttgccaagatgacccacgcacacttgcgaaaatgctttggcaatacctttgtagatttcccagtcgctgcgtgactcccaggccggatcgaccgccgcagaaagcggatgaataaacggatgcatatccgaggtgttcatatcgtctttttcataccaggtggcggtgggcagaacgatatcggagaacaggcaggtactggacatgcggaagtcgagcgtcaccagcaggtcgagcttgccttcaatcgccgcagtttgccactcgacttcttccggtttgatcccgtcgctggcaccgagttccttgccctgaatcccgctttcggtccccagcagatacttctgcatatactcgtggcctttgccggaggagccaagcaggttagaacgccagacaaacaaattacgcggatgattgctgccgctatctggttgttcgcaggccatacgcaactcgcccgatttcagcgcctgggcggtaaattctgtgggggataatccggccttgtcggcttcagctttaatcccgagcgggttacgccccagctgcggcgcagaaggtagccagcccatacgttcggcgcgaacgttgaaatcaatcagatgaccgctgtacttactggcatcggcgagcggtgaaagtaactcctgcgcagagactttttcatagcgccattggctggaatgattgtagaaaaacgaggtactgttcatctggcgcggtgggcggttccagtcgagcgcaaaggccagcggcaaccagccggtttgtgggcgcagtttttcctgaccgacataatgcgcccagccgccgccgctttgcccgacacaaccgcagaagatcagcatattgatcatcccacggtagttcatatccatgtgataccagtggttgacgccagcaccgaggataatcattgagcgcccatgcgttttatgggcagtatcggcaaattcacgagcgatggtttcaatatactggcgcggcacgccggtaatttgctcaccccaggctggggtgtacggtttgatttcagcgtaatctttcgcactgttttcatcttccagcccgcgatcgaggccgtaattcgccagtaccaaatcataaacgctgaccaccggacaggtgttgccatcgactaacgtcaggtttttaacgggcaattggcgcaccagcaccggattgtgttttacgctgcgaaaatgcggattttcaatgccgccaaagtaggggaaggccacgcctgcaacagcgtcatgttgaccgagcagggttaacgacaattcggtttccgtaccggcggcaatggattccagattccatttgcctttttctccccagcggaaaccaatcgaaccgttcggcactaccaattcacctgcggtattaactgctacggttttccactgcggattgttgctttcgcccagtccatccaccaggtcagatgcgcggatcatgcgcccgggaacgtagctaccatcgtcgcgaggctccagcattaccagcatcggcatgtcgctgtagcggcggcagtagttgataaagtagtcgctgggattatcgagatgaaactcttttaaaatcacatggcccattgccatcgccagggcgctatcagtgccttgtttcggtgccagccactggtcgcacaatttggccacttcagagtagtcaggggtaatggcgatggttttagtgcctttgtagcgtacttcggtaaagaagtgggcgtccggcgtacgtgtctgcggtacgttagacccccaggcgatgatgtagctggagttataccagtcggcagattccggtacgtcggtttgctcgccccaggtcatcggcgaggcgggcggcaggtcgcaataccagtcgtagaaacttaaacaggtgccgccaagcagcgacagataacgcgttccggcggcgtaagaaaccatcgacatcgccgggatcggcgagaaaccggcaacgcgatccgggccgtaggttttgatggtccagacgttagcggcggcaatcagctggtttagttcctgccagttggagcggataaacccgccgcgcccacgcacttgtttgtagctcaggcacttttgcggatcgttcataatcgatgcccacgccagtaccggatcgctgtgttgcttgagggcttcgcgccacagttcaatcagtcgtttacgaatgagcgggtatttcaggcggttagcgctgtaaagataccaggagtaacttgcgccacgcgggcagccgcgaggttcatgattgggcaggtcagggcgagtgcgcgggtagtcggtctgttggatttcccaggtcaccagaccatttttaacgtagattttccagctacaggagcctgtacagttaacaccgtgggtggaacgcacgattttgtcgaactgccaacgctggcgatagctgtcctcccagtcgcggttgctatgcatcacctgtccgtgaccatcggcaaaggtttcgcccttttgtttgaagtagcgaaagcgatccaaaagtttactcatgacatgactcctgctccaggaatgaattgggatctgatgccttgtcggatgcgacacggttgtacatcaggcatcgatctcttatttttggctgaacttccgccgaccataaaccagccaggtcagcagcacacaaacgatgtagaagattaaaaacactttcatcgcgccgaccggagagccggtcatattgagcgacatgccaaacgcctgcggaataaaaaagccgcccactgcgccaatggctgagataaagcccagagccgccgccgtttcggtgacggcttctttctgagcttgctcatcactaccgcctttcatctttacccgataaatggttatctggcgaaagatgacggcgatcatctggaaagtagaaccacttcccagacccgcagtcagaaacagccccataaatacggcgtaaaaggcgatgaaattaccggagcctgtgcccggcaaggtaaggaacagcagggcactgaaaatcgccataaaaataaagttgatcaacgtcacccgcacgccgccgaacttatcggaaatagcaccaccaaccgaccgcgcgatggcaccgataaatgggccaaagaacgccaggcgcagaatattcacatccgggaactgggtttttgccagcatggcaaaacccgcagaaaaaccgataaacgaaccgaaggtggcaaggtaaagcaggctcagcagccagagatgcaggcgttgtaagacagggagctggtcggcaattgaggcgcgtgaactggcgatatcattcatccctgaccaggcggcgatcgtggcaatcgccagtagcggtacccaaatccatgcggcattcgccagcgacatcaccgaaccgtcggcctgcggtacgccattgacgccgagaaaggcaaatacaggtacaaaaatgaccagcggtgcaaccagctgcattacacttacacctaagtttcctaatccgccattaatcccaagagcgctcccttgtttggcttttggaaagaagaaactgatattgcccatgctcgaagcaaagtttgcacctgcaaaaccgcatagcaaagcgataacgataaatatcccaaaaggagtattcggattttgcacggcaattccgagccagacgcaaggaataatcaggattgcagtactaaaaaccgtccatcggcgtccaccgaatataggcaccataaaggagtagggaacacgcaataatgcgccagaaacggagggtaatgcggttaataaaaagagttgatcggtagtaaaattaaaaccgattttattgagattaacggtaactgcgctaaatagcatccagacacagaaggcaagaagtagacaactgactgatatccagagatttcttcgagcaatatgttttcctttattttcccagaaggccggattttctggtttccagtcgcgcaaaagataacgactatttttctcattttgcagtgccatattgttcctcacatgcacacattggtaatgaaaaaaagacaaaacacgaggtaaggcgcaatagccagttattagaattaaggatgaattgggtgaagtgctgattgaaagaatagataagaaagcgtaaccgcgggggcagaatggggattaagtagccagatatgtgttactaaatgtaactaacaagctaaccttcaaacggggttaatctttgaacgtatgtcatgtttcaacccttcagatcgtgaatctaaagggttacatattaactatattatcaacaagaccagacacttatagaattagtgatgatttattcactaaaaaggccatgaactggaggaaaacgatctgtccagaaggtctatcggttcctctcttattgcctgattgtaataatcgttattacagtaagtattgtttatttcatctaaggtcatgtttttaacttttatattcctctggtttacaacttcctctgtcttgtaagtgtgtatattatatggggtatatgcttttttaataggatagtgaaacaattcgttatccacatctattccgtcagagtgaacttcaaatgcaccaggcgaaagaattgccaggccagtattaagcttaagtgctggggaaaacaaattaaataacatgagctgcatagtagggcaattgttcttcccagaaacatttaaaaaatttaagttttgctctgttttattatggggaataaagttccaatatcggatgtattattagtatcaatgtgggttattttattattgtccagtcttaaacttttgatagatggaagataagtcaggaaatcaagatttatatatttcaactggttgttagcagcgtttaatgtctgaacattgcagaagttgctatagaatattttaatttcagaaagcaagttgttgttaataagtaacgtattcaagttgggaaataagtcattgtgtaaacttgttagtttattatgggatagatccagcagtaagagttcatttttattacctgcaacaatatcagttaattgattatggctgagattcaggtattgcagccattcgcaagattctaattgcacaaactctagttgattatgtgccgcactaaaataagtaactgatgaaagcctatctatatcaatatttctgagagcattattattcatagatatatgtgtaatacttacatttctgccttgaggaaaatttattgactcaagagcattactattcagacttagctttacgagtctatcgtagttggttgcatcaaaatgtgtgagttggttattatcaagattgatagatgtgaagttttgcagccctggtggttgagtggttaaattaagtcctgataaatcaatggtcacttcattagtgtcatcaattatatttcttactgcagtccagtactgcatttgtgcaagtggatcattgttgatgccgttaactaatacatgccaaagatgttttgatgatattagttgatcaatgtcattggttggcagtaaattgttattgcttaagtttaaatattccagttttgtagtgtttttggcgtttaaatgtgcaatatggttgtcgtttaaagtgattgttttcatcctgggatgattgtgtaatataaggtcagtgatcatattgtgatgggcacttaactcaatcagagattcttgccgcgcgagccgttggcttcatcgttatagcctttaaaatcatattcccagtgaccaaaaccaatcatttgatcattgatttgcgtttctcctttaaagccgagacgggcataagttttatcaccatcgtcacgcttatcatcagtaaaataacgtagagcggtaaccttgccataaaggtcgagtttattaccatccttgttatagacttcggcagcgtgtgctacgttcgcagctaacaaaccagttacaaccaccgcaactatttttaatttcatttaacagaatccttttaattatcgttaaacgtattttctaaacgaattttaaacggcgtcatttataaatgacatactgtttttaaaatagaatggtgattaaaaacaatgagaaaaatagatgaaataatattatttatcgatatgtgatcgaagtcgaaatgagatataaggtgaattactggtatttgaaatttatttttttaatattgtcggaatttatctgattaactaccgggccgtagacccggcagttattttaaccacgacgtgtcgccagccagcagagcagggaaccgccgcagaccatcagcgcgccttgccagaacgagaacgacagcggggcgctgagcagcacggctgcaagcgctgaggaaagtacaggcgtaaaatacgaacctaccgccataatggtgacattgccatgcaatataccgacattccatgcagcataagcaaatcctaaggtaaatgccgcagagatgagtttaatcatgacgggcgtgctaaatatcatttctggttgtggcgtaagaaaatagtaaacccacagacttgctcccgttagcaggacaaaaacggtaattccattaaatccgcgtgcgtatttattcgttactgtgcaataggctgcccagataaacgcaccaatgaacgccaggaaataactcaatgggctggtggtgatattattgatgatttcatcataatgtaacccattgtcaccgcctaacacccaacagacgccgacgagggctaataataatccaggtacaatcaaccagttggttttctgaccattaaacagaatggcaaagagaattgtcaggctgggccacagatagttcaccatacccacttcaatcgcctgatgacgggtcgccgcataccctaaggaaagcgccagacagatttcatagctgacgaataacagactcccggcgagtaaatagcctttcgggatttgccgaatacgcggaaatccaaccgtgaagattaacagcagcccgcttaatgaatagatagcagctgcgccgccgaccgggccgagcccctcactgacaccgcgaatcaatcctaccatcgtgctccacaggacgatcgctatcagccctatgagcgttgctttttgtcgtgtcatgctcgctgttttgtctctcttgccgttaaaaattaagctgaattttatagcatttttttaactggcctgtcaggcagtggtgcgtttttctaccgctattgaggtaggtcaatttgcgcaggcggattattttgtggcaaacacgtgttctttttgatttcgcgcaaaaagattcagaattttactgttagtttcctcgcgcagtaatacccctgaaaaaagaggaaagcaatggacgtcagtcgcagacaattttttaaaatctgcgcgggcggtatggctggaacaacagtagcggcattgggctttgccccgaagcaagcactggctcaggcgcgaaactacaaattattacgcgctaaagagatccgtaacacctgcacatactgttccgtaggttgcgggctattgatgtatagcctgggtgatggcgcaaaaaacgccagagaagcgatttatcacattgaaggtgacccggatcatccggtaagccgtggtgcgctgtgcccgaaaggggccggtttgctggattacgtcaacagtgaaaaccgtctgcgctacccgcaatatcgtgcgccaggttctgacaaatggcagcgcattagctgggaagaagcattctcccgtattgcgaagctgatgaaagctgaccgtgacgctaactttattgaaaagaacgagcagggcgtaacggtaaaccgttggctttctaccggtatgctgtgtgcctccggtgccagcaacgaaaccgggatgctgacccagaaatttgcccgctccctcgggatgctggcggtagacaaccaggcgcgcgtctgacacggaccaacggtagcaagtcttgctccaacatttggtcgcggtgcgatgaccaaccactgggtggatatcaaaaacgctaacgtcgtgatggtgatgggcggtaacgctgctgaagcgcatcccgtcggtttccgctgggcgatggaagcgaaaaacaacaacgacgcaaccttgatcgttgtcgatccccgttttacgcgtaccgcttctgtggcggatatttacgcgcctattcgttccggtacggacattacgttcctgtctggcgttttgcgctacctgatcgaaaacaacaaaatcaacgccgaatacgttaagcattacaccaacgccagcctgctggtgcgtgatgattttgctttcgaagacggtctgttcagcggctacgacgctgaaaaacgtcaatacgataaatcgtcctggaactatcagttcgatgaaaacggctatgcgaaacgcgatgaaacactgactcatccgcgctgtgtgtggaacctgctgaaagagcacgtttcccgctacacgccggacgtcgttgaaaacatctgcggtacgccaaaagccgacttcctgaaagtgtgtgaagtgctggcctccaccagcgcaccggatcgcacaaccaccttcctgtacgcgctgggctggacgcagcacactgtgggtgcgcagaacatccgtactatggcgatgatccagttgctgctcggtaacatgggtatggccggtggcggcgtgaacgcattgcgtggtcactccaacattcagggcttgactgacttaggcctgctctctaccagcctgccaggttatctgacgctgccgtcagaaaaacaggttgatttgcagtcgtatctggaagcgaacacgccgaaagcgacgctggctgatcaggtgaactactggagcaactatccgaagttcttcgttagcctgatgaaatctttctatggcgatgccgcgcagaaagagaacaactggggctatgactggctgccgaagtgggaccagacctacgacgtcatcaagtatttcaacatgatggatgaaggcaaagtcaccggttatttctgccagggctttaacccggttgcgtccttcccggacaaaaacaaagtggtgagctgcctgagcaagctgaagtacatggtggttatcgatccgctggtgactgaaacctctaccttctggcagaaccacggtgagtcgaacgatgtcgatccggcgtctattcagactgaagtattccgtctgccttcgacctgctttgctgaagaagatggttctatcgctaactccggtcgctggttgcagtggcactggaaaggtcaggacgcgccgggcgaagcgcgtaacgacggtgaaattctggcgggtatctaccatcatctgcgcgagctgtaccagtccgaaggtggtaaaggcgtagaaccgctgatgaagatgagctggaactacaagcagccgcacgaaccgcaatctgacgaagtggctaaagagaacaacggctacgcgctggaagatctctatgacgctaatggcgtgcttattgcgaagaaaggtcagttgctgagtagctttgcgcatctgcgtgatgacggtacaaccgcatcttcttgctggatctacaccggtagctggacagagcagggcaaccagatggctaaccgcgataactccgacccgtccggtctggggaatacgctgggatgggcctgggcgtggccgctcaaccgtcgcgtgctgtacaaccgtgcttcggcggatatcaacggtaaaccgtgggatccgaaacggatgctgatccagtggaacggcagcaagtggacgggtaacgatattcctgacttcggcaatgccgcaccgggtacgccaaccgggccgtttatcatgcagccggaagggatgggacgcctgtttgccatcaacaaaatggcggaaggtccgttcccggaacactacgagccgattgaaacgccgctgggcactaacccgctgcatccgaacgtggtgtctaacccggttgttcgtctgtatgaacaagacgcgctgcggatgggtaaaaaagagcagttcccgtatgtgggtacgacctatcgtctgaccgagcacttccacacctggaccaagcacgcattgctcaacgcaattgctcagccggaacagtttgtggaaatcagcgaaacgctggcggcggcgaaaggcattaataatggcgatcgtgtcactgtctcaagcaaacgtggctttatccgcgcggtggcagtggtaacgcgccgtctgaagccgctgaatgtaaacggtcagcaggttgaaacggtgggtattccaatccactggggctttgagggtgtcgcgcgtaaaggttatatcgctaacactctgacgccgaatgtcggtgatgcaaactcgcaaacgccggaatataaagcgttcttagtcaacatcgagaaggcgtaagggggcgaacagatggctatggaaacgcaggacattatcaaaaggtccgcaactaactccatcacgccgccttctcaggtgcgtgattacaaagcagaagtcgcaaaacttatcgacgtttccacctgtatcggttgtaaagcctgtcaggtggcgtgttcggagtggaacgacatccgtgatgaagtggggcactgcgtcggggtttacgataaccccgccgatctgagcgccaagtcctggacggtgatgcgctttagcgaaaccgaacagaacggcaagctggagtggctgatccgtaaagacggctgtatgcactgtgaagatccgggctgccttaaggcgtgcccgtctgctggtgcaatcattcagtacgctaacgggattgtcgatttccagtcggaaaactgcatcggctgtggttactgcattgccgggtgtccgtttaatattccgcgcctcaacaaagaggataaccgggtatataaatgcacgctctgcgtcgatcgcgtcagcgtcggccaggaaccggcttgtgtgaaaacctgtccgaccggggctatccacttcggcaccaagaaggagatgctggagctggcggaacagcgcgtggcgaaactgaaagcgcgtggttacgaacatgctggcgtctacaacccggaaggggtcggtggtacgcacgttatgtacgtgctgcatcacgccgatcagccggagctgtatcacggtctgccgaaagatccgaagatcgacacctcggtaagcctgtggaaaggcgcgttgaaaccgctggcagcggctggctttattgccacttttgccgggttgattttccactacatcggtattggcccgaataaggaagtggacgatgacgaggaggatcatcatgagtaagtcgaaaatgattgtgcgcaccaaatttattgatcgcgcctgtcactggaccgtggtgatttgcttcttcctggtggcgctgtccgggatttcgttcttcttcccgacgctgcaatggctgacgcaaaccttcggtacgccgcagatgggacgcattttgcacccgttcttcggcattgcgattttcgtcgcactgatgtttatgtttgtgcgttttgtgcatcacaacatcccggataagaaagatattccgtggctgttgaacattgtcgaagtattaaaaggcaatgagcacaaagtggcggatgttggtaagtacaacgccgggcaaaagatgatgttctggtcgatcatgagcatgattttcgtgctgctggtgaccggggtgattatctggcgtccgtactttgcgcagtacttcccgatgcaggttgttcgctacagcctgctgatccacgcggctgccggcatcatcctgatccacgccatcctgatccatatgtatatggcattttgggtgaaaggatcgattaaagggatgatcgaagggaaggtaagtcgtcgctgggcgaagaaacaccatccgcgctggtatcgtgaaatcgagaaggcagaagcgaaaaaagagagtgaagaagggatataatctcttttgaactttaagctgaaaatggcgctgtaaaaggcgccattttcatattgtagacaacgtaggctttgttcatgccggatgcggcgtgaacgccttatccggcatgaaaacccttcaaatccaatagattgcagtgaacgtgtaggcctgataagcgtagcgcatcaggcaatgttgcgtttgtcatcagttctaaatggcgctttataaagtgccatttttttattgcgtaaccagacggcgtaatcgcgacacatccactgttttttctgcctctgccagactccaggcgttttgcagattcagccacatttgcggcgaactgccgatcaccacggaaagtttaatcgccatttctggcgtcaaagctgcttttcctgtcagcaatcggcttgccgttgagggagcaatttccattgctctggcaaactcgcgcaggctgacattaagttcgtctagtgattcctgaataatgtcccccgggcggggatgattggccattttcattagtgtctttactctcagtagcgttccttcactgggaacactatcattattgttccttcctacgcaacaataatccatttagccatttcatgttggagagtgtgcgatgctgcgacccgaacatggcagtcgcagcaaaggcctcttagtgacggaaatcaatcaccatgcggccacggattttgccttcttccatctcagtaaagatggtgttgatgtccgctaacggacgcagggcgactttcggcaccactttaccttcggcggcaaactggaaggcttcagttaaatcctggcgcgtgccgaccagcgaaccgaccacttcaataccatccagcacaagacgtgggatatccaggctcatagactccggcggtagaccgacagccacaacacgaccgcctgcacggacagcatcaactgccgagttaaacgcagctttagctaccgctgttaccaccgcagcgtgagcgccaccagttttctcctgcacaattttggcggcgtcttcggtgtgtgagttaatcgctaaatctgcgcccatttcggttgccagttttaactgctcatcattgacatcaatggcgatcactttggcgttaaagacattcttcgcgtattgcagggcgaggttacccagaccgccaagaccgtagatagcaatccactgccctggacgaatttttgacagcttaacggctttgtaggtggtgacccccgcacaggtaatgctgctggccgccgccgagtccagaccatctggcacttttaccgcgtaatcggcgaccacgatgcactcttccgccatcccgccatcaacgctgtatccggcatttttaactgaacggcagagcgtttcgttaccactgttacagtattcgcaatgaccgcatccttcgtaaaaccacgccacgctggcacgatcgcctggttttaatgaggtgacacctgggccaacttctgccaccacaccgatgccttcatggcccagaattacgccggttttgtcaccaaaatcgccattcttaacatgaagatcggtatgacatacaccacaacactccattttcagcagggcttcgccatgtttcagtgagcgcagtgttttatacgtaacgtcaacatgatgatccttcgtaacaactgcagccttcatagttcctccttttcggatgatgttctgcatagcaggtgaggcaaatgagatttattcgccactacccagtatggatgagatctgaaaaagggagagggaaatagcccggtagccttcactaccgggcgcaggcttagatggaggtacggcggtagtcgcggtattcggcttgccagaaattatcgtcaatggcctgttgcagggcttcggcagaggttttcaccgccacgccttgctgctgcgccattttgccaaccgcaaacgcaattgcgcgggagactttctgaatatctttcagttccggcagtaccataccttcgccgttcagcaccaatggtgaatactgcgccagcgtttcacttgctgacatcagcatctcatcggtgatacgtgacgcgccggaagcaataacacccagaccgatgcccgggaaaataaaggcgttgttacactgggcgatagggtagattttatctttccataccactggattaaacgggctgccagtggcgaccagcgcgttaccttcggtccaggcgataatgtcctgcggtgtggcttccacgcgtgacgtcgggttagacagcggcatcacgatcggacgcggacagtgtttatgcatctcacggatgatctcttccgtaaacagcccggtctgtcctgagacgccaatcagaatatctggttttacattgcgcaccacatccagcagtgacagcacatcgctgtcggtatcccagtcactgaggttttcgcgtttctgcaccagtttggtctggaaaggcagcaggttcggcatcttgtcggtcagcaagccaaagcgatcgaccataaagactttctgccgcgccgcttcctcgcttaatccttcgcgctgggtctgggcgatgatcatttcggcaatgccgcatcccgctgaacctgcaccaaggaagacgatttttttctcgcttaactgaccacctgccgctcggcttgctgcgatcagtgtgccgactgttaccgccgcagtgccctgaatgtcatcgttaaaagaacaaatttcattgcgatagcggttaagtaacggcatcgcatttttttgagcaaagtcttcaaactgcaacagcacgtctggccagcgttgtttcacagcctggataaattcatcaacgaattcatagtattcgtcgtcagtgatacgcggattacgccagcccatatacagcggatcgttaagcagctgttggttgttcgttccgacatccagcaccaccggaagggtatacgccgggctgatgccgccacaggcggtatagagcgacagtttaccgatcggaatgcccatcccgccgatgccctggtcaccaagccccagaatacgttcaccgtcagtcaccacaatcactttaatattatggttcggcacgttttgcagaatatcgtccatattgtgccggttctggtaagagataaacacgccgcgtgaacggcggtagatctcagaaaaacgctcacaggctgcgccgacggttggggtataaataacaggcatcatctcatcaagatgattgtttaccagacggtagaagagggtttcgttagtgtcctggatgttacgcaggtagatgtgtttgtcgatttcggttttgaatccctgatactggatccatgctcgttccgcttgttcttcgatggtttcgaccacttccggcagtaaccccagcaggttgaagttacggcgttcttccatgctgaaggcactgcctttattcaacaacggaaattccagcagtacagggccagcgtaagggatataaagcgaacgctgtttttttgtttttggttccatgtcactcactcttttttgaatatccatccctggggggcttttatcgtctttgctttaccgccagggcgtcggcctcaagtataaagcagataaaaacaaaaacaccattgcgcaggcaatggtgtttaatcgtcattgaggactgatggttatgaattacttttcagcggggcgttttctgccggttgggttatttactacgctggatttgtcaccttcggtaactattttgcgctggttagaaattttatggtccagtccaagaatatgacgtgcctgacggttcgatttcattttaactcctcaatcctgtagctagttttaaggacaacatcgccgtagcgaagaaacacgtgctaaacccctaaattaggttgccgatcaagcatagcaccttaaagcgtagggtgctggccactgaccacataattgatcgtttgctggtagatatcactgaggatgtcgttatcagaagcttcaacccatttggtcagctccatgagaatgtcatcttcagtgacaacaccatgctgtgcccgaaggccttgctcaatggcattaaccagagcgggttctgctgttgaattttctgcctgataataagtaaacatagtgattctccgtgtctgtgtatttatggtgtctgctacggatcgcagatttataaagcacattcagcatggcaaatatttgccgcttcgttgttaagattagtcctggttgatgatttttatattttaacaccatgatattcatagggattgtgattggtatgatccgattaatattgatacaatatcttttgggttatatattcccggtaatctattgtgggaatttaatttaagtgcagaagtaatattttcgccggattttattcggaatatcctgcttatcctcgtgctgtttctcacgtagtctataatttcctttttaagcccacaggagagcaacaatgacaatccataagaaaggtcaggcacactgggaaggcgatatcaaacgcgggaagggaacagtatccaccgagagtggcgtgctgaaccaacagccgtatggatttaacacgcgttttgaaggcgaaaaaggaaccaaccctgaagaactgattggcgcagcgcatgccgcatgtttctcaatggcgctttcattaatgctgggggaagcgggattcacgccaacatcgattgataccaccgccgatgtgtcgctggataaagtggatgccggttttgcgattacgaaaatcgcactgaagagtgaagttgcggtgccgggtattgatgcctctacctttgacggcataatccagaaagcaaaagcaggatgcccggtctctcaggtactgaaagcggaaattacgctggattaccagttgaaatcgtaaagcattgccggatgacgcgtcaggcgcgtgaatgcctgatgcgttgttagcatctctacagcgcccgccagcaccggagctcacgtccgtcctcccttattgctaatgattgccggacttcacatccgtgggttgccagcgggcaacgttcgtagaaaaaacagccttgcggcaacgtgcggtttcccggcagatccgttttacgtaatgcccattcttcctccagcggtttatcaatggcggggagggaatccagcaataatcgggtgtatggatgtgcaggtgccgtcagcacctgctgcgcgtcgcccagttctacaatctgcccgagatacatcaccgccacccgatcgctcatatgacgtatcaccgagacattgtgtgaaatcagcacataggtcagcccgtgattttcctgtagcgttaccagtaaattgaggatctgcgcctgaacggagatatccagcgcagaggttggctcatcaagcacaatcacgtcaggctgcgaagagagtgctctggcaatggcgatacgttgccgctgcccgccggagaacgcatgaggcaggcggtcgagatactccggacgaatacccacctgcacagccaactcctctgccaacgctcgccgctgttgttcactactacgcttagctatccagagcggttctgtgatgatgcgccacaccggtaagcgcggattaagcgaagagagcgggtcctgaaacaccatctgcataatgcgttgtgagccagaacggatgtactgcccgtggctcggttgcagcatacccattaaaagctgtgcgagggtgcttttgccgcagcctgactcgccgacgatccctaaggtttcaccacggcggatctgtaaatcaataccattaatggcatgaacatgttccgtagttttaccaagccagtttttacgggccgggaaattgatatggacgtcgcgtaacgttaataacgtgtcagacacttataacctcctgctgcggataccaacaggcacagcgctggttgttgtcaccacacgctgtcagcgccgggacgttttcacactgtgcacctgccgcatagcaacgatcgcgaaaagcgcagccgtcaggcaaatgggtgaggtttggtaccgtccctggaatggcgggtaatagctggcgtggtactccatgttctggtgcgcattgcagcaaaccaatggtatacggatgccggggatgatggataacgtctgccgtcacgccgctttcaattacgcttccggcatacatcacgtaaacgctatcgcacagttgcgacaccacgaccatatcatggctgatgaacagaaccgcagttccactggcgcgggctttatgtttaagcaaacgcagtacctgcaactgcaccgtgacgtccagcgccgtagtcggttcgtcggcaataatcaattgcggctcgcaggagaatgccagcgcaatcattacccgctggcgcataccacctgaaagctcaaacggatagcgcgacataacttccacggcatccgggatttgcatctcttccagcaggtcaatcgctttagctctggcttcccgacgacttattggttgatgatggcggatcacgtccatcatctgaagacctattcgacgtgtcggattgagggcggtcatcggttcctgaaagatcatcgccactcgtgcgccgcgccactgacgaagctgtttttcccgcgcgttaagaacatcttctcccagcagggaaatctgcccccgatgtacgcaataactgcccgtcggtagcagacgcataatcagcattgcggtgactgatttacctgagccggattctcccaccagaccgacaatttcaccgcggttaatctgcaaggacacattgttgagcgcgtgaacatcaccgttaaaaccggggaaactcaaatgcagttgttgaatgtccagaacgggttgggtcatgactgctttcctcctgctttcgggtcaagcagatcgcgaataccatcaccaaagagattaaacccgacggcggtaagcaaaatcgctgcccccggaaatgcgcaataccaccactgatcgagtacatagttgcgaccatttgctaccatcgcgccccattcagcactcggttgttgagcacccaggccaataaatcccaacgtggcggccattaaaatcgcgctaccgatatccagcgatgcctgcacgatcagcggcggtagggagttacgtaaaatatgccagttgatcagatgccaacgagacgcgccaaaggttttcgccgcctgaacataggtatactggcgtacaactaatgcttgcccccgcgccaggcgcacataaaagggaattcgcacaatagcaatagccagcatggcgttaaacaaactcggcccgagagcggcagccagtgccattgtcagtaccaacgaaggaatcgacagcataatgtccatgatgcgcatgatgatggcgtctgcgcgtccaccaagcacaccggatagacatccgagtagcgaaccaatcatacccgcaatggcaaccacgactaatccggcgagaattgattgctgactgccgaccagtacgcggctaaacagatcgcgtcccacttcatcggtgccaaaccagtgcgccgcagaaggcggcaaaaggcgggcggttaaatcaatggcgttgggatcatgcgtcgccagccacggtgaaaaaatcatcatcaatagcattaatacaatgatgactgcgctggtcacggtgagcggactgcctttcagcatccataccagttttgcaccgttaaatcgcgtttgtttttgtgggcgtacggcggacgtttcctcgcttagcatcattcaccacctccacgtccgatacgcggatcaatccacaaatagagcaaatccaccaccaggttgaccagcacataagcaaatgaaaccacgacggcaaagcccatcactgccgggaagtcgagcgcctgtattgatgttactacccatgcacccattccgggccaggcaaaaacggtttcggtgagcactgcgccatacaacaaatcgcccagcgccaaacccaatacggtaatcgatgggatcaacgcattgggtagcgcataacataaaacgatataccagccgggcaagccgctggcccgggcggtacgaatgtagtcttcactcaattgttccagcatcgctgagcggatctggcgagcgacaattcccaggtgaacgaacgccagcgttaatgccggtaagatgagatgttgcaacgcattgaagaagacttcaccgttgccttcaagcagcgcatcgagcagataaaagccggtaacgtgcgttggtggatccagccagtcatcaagccttccgccgccgggaagaatttgcagatgaccataaaacagcacaatgacgcccagcccaagccagaacgcaggtgtggagattccggtaatggccattattcgcaccagatgatccagccagcgatttcgccagactgcagagagtatgcccagcgggatgccaatcaggagtgccagcagcagggcaccaaaagccagctccagcgtcgccgggaaaaatatacgcaactcttccagcaccggacgcccggtacgaatggatgttcccaggtcaccgtgaaacaggtcgctgacgtagcggtaaaactgtacatacagtggctggtccagtcccagttgctggcgaatattttccacgatagcatcgctggcgcggtcacccgccagtaaccgcgccggatcaccagggatcagatgcgagataataaacgtaatcacgcagacgcccgccaccacgagcaccagcccccagcagcgttggcgtaaaatactccagaaggtcacgttatttactcatggtattgatattgaagacctgttccagcatgggattgaacacaaagcctttcacctctttgttcatcgccagttggtagtttttctggaacaggtacacataagcagcgtcatcaatgacgattttctgtgcctgctggtagtcccgggtacgctgcgtctggtcggtggtcgcaagcgcattgcgcagtaacttatcgacctcactgttttcatagaacgagcggttacccggcagaccttttttgtctgactcaaaccagtaattcataaacatatacgggtcggcaaaatccggactccagttgccaatcgcaatgtcgtaatcacctttacccactctgtcgcgcatggtggcgttcgccagcttttccagcttcacaatgatgcccagcttgttgagactggattgtgtcgccagagcaataggctcccagttcggatcgttatcggagtagagaaacgtcaggctggtgggtttgctcgtcactttatcccattcggctttggctttcgtttcgtcatggttgtattgcattgccgtcgcatcgtagccccacatgccttccggaatcgggccgcgcatctgttttccgttaccactcagaatgccgttaaccatgccctgataatcggtagaccaggaaatggcccgacgcagatccgcctgattaagaggcgctttgctgttattcagatacagataggtaacgcgcagtgacggatactctgccacattgactttattttcctgcttcagggcgttgagttgatccaccggcagcgcatcggcaatgtcaatgtcgccacgggagagctgcaggcgacgggaggcactttcaccaataatttttaccgatacccgtttgaagttcggtttattgcctgggtaatgcggatttggcaccagaactaattgctgacctttttgccagcttttcagcataaatggtccggaaccggcggtattttgcgcgaggaagccgcgagcatcatccgctgcatgttcctttaagaccgccggattgataatggatgcaccgtcattcgccagcgtgtagaggaacggtgcgaatggttggctaagggtaaacttcaccgtatgttcgtcgggagcatcaatctttaaatctttgggaaatgcttctgctggcccctggccgatttttagtagccgctcaaaagaaagttttactgcttcggcagtgacaggtgtgccatcggcaaatttagcattatctttcagggtgaacgtccactctttttgatcgtcagacgctttccagctacttgccagatcgccttcaacgtcggttgagcctttatcaccgtccgttttgtactgaaccagccgctgataagacgggtaggtcactgtccagtcgttattatctattgttaccgccgggtcgagggtttgtggatcggcggccttaccaatcaccagcatatcttttggtacggcggcgtgcgcaaccgggaaatttgtggcaaggacgagcgcgagcaatgtgggacgaaacgatatcgatctcttcatgacagtttcctgattaactgacgtgctgtgtgccaggggatataaaacaagagaattgatcagcgagcagagggtaactcgctgcctggggtaattcgaagtgccaccattcgctggagataccgacaaaaccgccaccagtcattatcgcattcagcaacagccgattgcgctgagcggcgggcgggacggaagggtgataggcatgggagcgctcgtgcatttcatcgaaccctgcgcccatatcgaggatgttcccgtgctcatcacgaagcgtcaggtcgatcgccgtgccacggctgtgattagaaccgaccgtcacatcaacaacatattgcgggtctgggcaggcttgccacaacatcgcctgtgcttgttgtgggcgatacgcatcgtaaatcaccagttgtaaccctgacagctgggcgatgctgatacttttcgccagcgcggtaatcgcatccttgtgtaacagacaacgcgcttgctgataaatagctttacctgtgatgttatcagcgcaggcgtatttcaattcgatctccagatcagggaagattacggctaaatcaaccagttcggtggtatccgacataaacggttcctgtataagacaaaaattgctgcgctttccgcttatgcagatctcatgccatgccgggataagcgccagaatgctggcttaaagttatattttttaacttttgatcaacatttgtgcagcgtagtgcagttttggtgcaagaggggaagttaaggaaggaatctcccggaatcgtagctgaaatcacagtatttaagtgacagtgtcacgttaaatgaaaacccgcgagtgcgggcgagaggaatttgtcagattttcagcggtaacacgctgctcatccagcctggaatttcttcggcgggtagggggcgggaaaagaaatatccctgaataacgcgacagtggatcttgcgtagcatctcaaattgctctttggtttcgacgccttccgccacgacggttaaattgaggctttgcccaatgctggtaatggcttcaagtaaggcaaggatgcgtttttcggtcagacaacgatcgacaaaacttttgtcaattttgatttccgttaccggaagactgactaagcgggataatccggaaaagcccgtaccaaaatcatctaccgataagcccacgcccatatcacgcaggatctgaatgcgcttaaagatttcggtatcgtgttccatcatcatgctttccgtgatttctaccgtcagctggtggccgtcaataccccaggcgtgcattgcatcagacacctgattaggcagttgattactgcgaaagtgcagcgccgacaagttcacggataacgccgggatatgaatattctggctacgccattctgctaactgacggcaagcttccgcgatgacccagcgcccaatattttcgatttcaccaatctcttctgcgagaggaataaaccgtgaagggggcacatgaccatgcaggggatcgtgccagcgagcaagggcttcgatgccgtacagttcacccgtttctgcgaagatttgcggctggtaaaccagtttcagttggttattgctaatcgcttctttcagcgctgcgcctaaaaccaaacgctcttttaccatttcgttcatcgccgggctgaagaactgccagccgttaccgccattcttgcgaatataatccattgcattgtgagcagtggagagcaagtaatcgcggtttttacccaggtcgtagctgatgccaatactcaaggtaagcgggaagggtttatcgtcaatcattatcggcttgctgaccacattccgtagctcatcggcgatttgggtaatgttactgacgtcgttttcgaggctcacgaggacaaactgcgtaccttcgatacgacagagatactgatccggtttgagtttttcacgaaagcgattgaccacttccagcaatgcctgatcggcccacgcatagccaaggctatcaatcacatcctgaatatggtcaacaccgatgagatacaccacgggagagacggctttgtcgaccaggtcatcgaggtaattgtgcaggttattgcgatttggcagaccggtcatcggatcaaattggatgagttgttcaatatgctgacggcttttttcctgttccagcgccagcgcggccatatgctggctgatatctgccacgcgttcgataaaggcgctggtttctgctcctgacgaggttttaatttgcaggatccccgcaggcgcgccatcacgctgacgaatggtcgctgaccagctttgcgcattttgaatttctgcaccgtgggaagatgacgcccagtgtatcggcatcccgttgcgcagtgcgaacagcgaaacatgcgattcgttgagtacagattcgatgttacgacaaatgatttcccccatttcatgaaatggcgggctgctgcacatggcggcgagaatattgccttcaagctggcgaatctgccgttcttcggtgatatccgagaaagtcattaccaggttctgcagatgcgcgagcacgtcataaaccgggctgatagaggctttaatccagattttttcaccggtgcgcgtcaacagcagaaattcgtcctgatcgcgggcggttttccatagcaactgttgtaaacgaatgcggttatcggcagggaattcaggaatgttcaggagtgtatcgggctgcataccgctggcttcgctaatgcagtaaccaaacatttcggtaaatgcgcgattgcactgcacaatatggcgttccggatcgaggacaatcaccggtcggtcgagatggtcaacggcaataatcaattgtcgggtctgttctttttgcgccatttctacgctggcatcccgtaccagcgccaggtaataaactttcccctcggcgctcactttcgatagcgcaaaacgggtccagattttactgccgtcttttttctccagctgcagctcccgactcatcccctcaacacgcgctttaccgccttcacggttgtgacgaatgtattcaggatgcgcaggacgcaaatcccgcggaatcagcatatcaatgttattgccaatgacttcttcacgtttgtatccccagagcttctctgcggcggggttgaaaaacatcacttcatcattttcgttaattaacaccgcacccatcatattttgctcaagggcggggaaaaaaatgccatcggcggcattatccgcatcggttagcttcatgattacctctgcatcctggcgcatctaaagactggctttccagagttcaacacggtttctacctcgtcttttggcgatatacagagcttcatcggctatttgaatgaggcgctcatagtcaggatgaccattaaacatggcggcaccgatggaaagtgagagggcaatatcttcgccgtttgcggctttcagtttggttttctccacccgactgcgaatacgttctgcggtacgtaacgtttcgttttcagaagcttcagtcaaaacaatgataaattcatcgcccccgtagcggaaaacataatcactactgcggacgttgtcataaaaggcctgagagactttacgcagaatttcatcaccagtgttatggccccacgtatcgttgatctctttgaatttatcaacgtcaataatcagcactgacagcggtgtaccggtccggttggcatgggcaatttcgcgtttgaagatagtcggtaggaaacggcggttaagtaatttcgtcagtacatccataccgacttcgtggcgcgatacttcttcaaacaattcacgcagcaaggtaataatttgcgatacggtatttcttatctgtaataaaaatttcacccgcagacttctgttattcaaatttctggtgttacgcatggtttgattgaaaataccgtcgaaatcctgaatcagacgggagatatggcctacttcggcaataccactaaaataatgtcgacctttatggttaaaccacaggccaaaatcagcctggcttaaaggcaaactactgcctaaatcagaatccagcaggattttatagataatatctatttcccatgaaagtattgaggctatttgccgttctttttcttcttcggcgttttccagtaacgagaagatacgatagttttcatcttcctttgaggcactactgtcactaaaggtaaacgcgcgagtcatcacttccatcgcgatatcaatactgttaatcgagaaatggtagacctgaagtttttctgcggcggaataatccgaagagaagatcaccggatagaggatttttttcagcacccgaaaccccatctcgacaatttctaccggaattcctatgcgggcatgcacttccgcgacggtatgctggatttgtattagcctttcgacatcgtcaacctgggcagaaagcacgttaataatccagcgttccatcgcactcttcaactgccgctcaacttgttcattactcaagaattcttcggcatgcgggtcgatgcggacaattcgataaaactcgatactcagataatgagcatgcgcaacggcaatttccgcggctttagcacgaatgggcggatctgcctgttcgacaagtccggtccactcatctttcattcttttaaaatacatctccataattcacacccttataaggctgggaaatcagacggaatcaaaatgaaacgcaacgtgcgagatcgactaactgcaccatattctcctgaaatatgaagatatactgaaaagaaataagcgatttaggacagtttcaatctacgctactgttcttcagaagagtatagcccatcgtaattatttttcggtgacagcgaatatcgtatggtttttcatattcatacatttttattagggatttatggctgtttaactaagtgtggttaatttgacttaagtaagcatgattattagtgggatagtttaagagggtaacaagccggtggataaagcaccggcttgttacaaagtaagaatgggagtttaactgccccagcgactttgcagatagctgaccgcttgttgagtctgcggtttattcagatagtcctcacggaacaagatggtgccgctaatttcgggcacagcatcgttaagatcgagctgctttttcagttccggtacgccgccgttaatcatccagtctggctctatctttgaaggttcacccactttatagaaggcgataccgatatacaggcgggtcctggtcggtttaacgacatccgcccaccattttgccaacacgtcataacgcgcggcactccgtgagaacggccagtaaatttggggagcaatgtaatccagcaatccttgttccacccatcgacgggtgtcagcgtaggattcgtcataggctgccgcgcctcgggtatcggaaccgagcggatcgtgtgatcggttacgccacacgcctgccgggctaacaccaaattcgactcccggcttaatgcttttaatggtgtgcgatacctttgcaattaactgctgagtattgttgcgccgccagtctgcttttgacgcaaatgcgcctccgtatttacggtacgtttcgttatcatttagccgtgaacccggtgactccgtatagaaatagtcgtcaaactgcacgccatctacgggatagcgggaaaccacttctgcgactattgatgtgatccagtcctgaacctcagggatgcccgggtcgaggacaaagcgatcgccagacgttctgatccagtcgcggtgttgcacatagacgctcgccggttgttgagacagagtgctattcagttccctgatagtaccgggcttcgtattaaccgatacgcgataggggttaaaccaggcgtgtactttcatcccacgcttgtgggcttcgtcgagcataaattgcagcggatcgtaacccggattttcaccaatcttaccggtcataagatcggaccacggcaaaattttcgatggccacagggcggtaccgtccggcttgacctggaaaaagaccgtgtttatgccgagacgttgcagatgatccagtttgtcgatcatcgcctgttgttgtacacgggcccggctggtggggttactaatgttaaccgaggaaaccggtggccagtcgagccgagaaaccgtggccagccagatgccacgcatcggttgtgacgattgttgcgtcgtggctggtggctttgaacctgctggtggtgtcaccatggactctggaggcgtgcttttacaactacacagtaaaagtgccagtgcaactagtatcgctggtcttctaatcgttaatttcttgtttcgggagcagatatccatatgtgctggtttccggtaaacagatgtgcgctcattctcgtacttatccccgttaagtcaatacgacagcaagcacgaaaaagggagcgatgaattatcgctcccttgtcttataaccattcagacatggttagtgtttcttgtcattcatcacaatatagtgtggtgaacgtgcacgcgggtgcaggaagaagtgaccttttggtgcgttctgactgttgattggctccagagtgacgccggtatttgctttgcctttacgatcatgaacagcatagagaataaagggcagggcaagtaccaccaggaaactaacaaccagtaattcaacatacatatcggtagaatcaccctggatgttatccggcggcaggaaggaaacaataaacgccataattgaagtcagcagaccgacaattgccacgaccagtttcacccctttaccaccagggatattaaatgtgcgttttaagtcaggatgtttaagaaccaacacaatgtagccaataaacagcatgaaataagcacacagataaatcaccaccgtcagcgccagtgcgatcaggaaggacatgttgttaccgccaccggtattggtgaggatgatcaacgcgatagacgtaatcaccagctgcgaaatgaccagcgttaccggtacgccatttttgttcattttagcgaatgccgctggcagcaggtttttctgcgctgtgacatacatcccgcgagaaggaccaacaatccaggaggcgatttccgccagaacacccagcaacagcagtgcggagatcacgcgaaccatccactcaatttctggtgccacatgggacatcagaacggtaaaggtttgcattacccctgcggagaggttgatttcattacccggaatgaccatcgcaatagacaaaccaccaacagagcttaagcagattgccgccaccatcagcagtaacatagccaacggatagtcgcgccctgggttgctcatttcattgacgtgggttgcggatgcttctacgcccatataactcaaaatgaaggcaacaaatactaccagggtgcccactttagagaagtcagggaagaaggtcttcgaatccatttcgatagcaacgggggcaccggagtgcagataaatagccgctaatgcgatcaaaataaatgcaggtaacaggataccggcgaagaagccaactttagcaattcgcgccgtgtatttcgtgccaccaaactgcgttaatgccagcgcccaaagaatgatgagtgctgcaatagttttggtaatggggtcttcattcagcgctggccatttcaggatgtaggagagtgcccctaacacgaaatagagcatcggaataaaaccaatggcgatttgcagatagccaaatgagatcgctgcaaatccccatctcggccccagagtatttgatacccaggcgaagacaccaccttcttcccagccgtcgacggtggccatttccgcagcacaaagtcccacgggaataaaccataaaatcccgcctaatagcaggaagaagactaatgaaaagcccgatgttgcgaaggtagggtattcataaacagccattaccatcgatgccgttatggcaaagaatccaagtaatgtgagctgcttagctttacctgtctgtactgatgtagccatattatccccctaaaacggtattcctgtcggaaccgcacctgttttgttctgaagcgtattcagaacaatattttccgttgctaatgccagtgaacagactttggaaattgtcccgaaacgggttcgtttcgggacaccgttaccgttaaacgttatcaggtatgtttaaagctgttctgttgggcaataccctgcagtttcgggtgatcgctgagatatttcagggaggctttgtcaaacgattacgattggctaccttatgaagatgaatactaatgctgaatacttcacagtcataatacagattgttctttattcaaaagacaaccatctattgaaagtgcattagttatataaatcagatactctttggtggttattatgcaatatgcattagttgatgcgctggaacgaaaatttttgctggatgctcttgaatttggtgttctgaaggactggaaagaaaatccggtaaaagaacttcctgatattgatgaatctgctcaccccttccatgtctgttatggtggatatttattaaatcctggtgtttcagattcagatattagcagaaaaataaaagaccagacaggattctggctggcagctattgatgatacccgcatggattgtcattcaatagcttattatgatattcacacactccctgtgatttcatgtggacatcaaaagatagttccttttgcagcgttaataaaagctgatgaatgcattatttcaaaaattgcttcatattctggttttgccgtaacagcctttttgagaattaaagaccaggatatcgcaactaatatacttaaccgtgagggaattttttcctttaatggctgtgaacgcagattcagacatccagtaagtgaagataactggcaacaggcagtatcagaagaacgtgctatccgttgtgcaaaaagattaattcaatgtaaaggataacaaaatgagactttttatcgcagaaaaacccgcagtagcaaatgatattgttaaggcacttggtggcaattttacccgccatgatggctggtttgaaagtgataacgccattgtgactaactgttttggtcatattatcgaatcacaaccgccggaaaactataatcctgaatacaaagcctggaaggttgaaacgcttcctttacgtctttatcccgtgaagtatcagcctgttgaaagtgcagcaaaacaggttaaaacgattctcgaacttatcagacgtggagacgtgactgaaattgttcacgctggcgatcctgatgatgagggacagctacttgttgatgaagtcctggaatatgcaggaaacacaaaacccgtaaagcgcgttctgattaacgacaacacgcttccggcagtgaaaaaggcactggcaaatcttaaagataatcgtgatttcaaagggctttaccttaaggcgctggcgcgttcagttgctgatgccgtctatggcttctccatgacgcgtgcttacaccattccggcacaggccagaggatatcagggtgttctgtctgtcgggcgcgtccagactcccgttcttggcctgattgtgaaccgtacccgtgctaaccagaaccataaatccagtttttactacaccatgaccggagtctttcagcgtggtgctgatgttatcagggcgaactggaagccaggggaatttgctccgctgacagaccgtaaattacttgataaagcgtgggcagacggaacggctgcatcccttgccggaaaaccggctacagttgaagcggcagcaactgatgataaaaaaacggctgcgccgttgccgtttaacctggtcagactccagcaatacatgaacaaaaagttcaaaatgacggcacaaaaaacgctggatattacgcaacaattacgtgaaaaatataaagcgattacttataaccgctctgattgctcatatctttctgatgaacaattcagcgaagcaccgcaggttatcgatgccctgaaatcagtctttcctcagtcgctggatattgattctgcacgtaaaagcaaagcgtttaacagtgcaaaggtgactgcgcatactgcgataatcccgaccgccagtgtgcctgatgttaacgcactcagcaccgacgagcgcaatgtttacctggcgatcgcacaacactatcttgttcagttcatgcctgaaaaagcataccaggaagtatcggttgccattcagtgtggtgatgagtcgttctgtgcccgtgccagaaaaacaactgacagcggatttgaggcgtttcttggcgcggaaaccacagacgaaggtgaatcagaagataatgatgattccgcttttgaactgctctgtaaaattcgcacaggagaaacagtgacgacaaaagaagtggttgtgaatgagaagaaaacaacaccaccgccattattcaccgaagccactttacttgccgcgcttgttcgtgtcgcagattttgtcactgatccagtgattaaaaaattactgaaggataaagatcgggataaaaaggatgaacatggtggcattggtacgccagctacccgcgcagccattctggaaacgctgaagaaaagaaactatatcacgctggaaaaagggaaacttattcctactgataccggatatgcgcttattgatgccctgcctggtatagcagttaatcctgatatgacagcattatggtctgaaaagcagacagccattgaaaatggcgacctgacggttgaagagtttattaatgagctgtacggtgaactgacaggcatgatttctgatgttgacctgggcgagatgaagattgaacccgctgcgccagcagggcagtttcaacgcctggactctccctgcccttcctgtggtaaacatattgttatcagaccaaaaggttatttctgtaccggatgtgaatttaaaatctggagtgagttttctggtaagaaaatcacccaggcgcaggcagaaaaactggttaaatcagggaaaaccgatttgattaagggatttaaaaagaaaaacagtggaacgtatgatacagttcttgttcttgaggataagaaaacagggaagctgggttttccggcaagggctaagaagtgaaaacaaagcaggaatggctttttcagttaagaaaatgtacatcaagagatactcttgaaaaagttattgagattaaccgttacaagctgcctttatcagaatcagaggcattttattctgccgcagaccatcgccgcgcagaactggtgatgaataaactttatgataaggttccttccggcgtctggaagtacgtccactaaacaagaggattaattatgagcgaactgactaaagaagatgaatacggcattatcagccggactatgatgaatattcgttcattgcgtgtttttgcccgtgagattgattttgagcagttgctcgaaatgcaggaaaagctcaacgttgttattgaagaacgtcgtgaagatgctgaacgtgaagcggctgaacgccaggaacttgaagccaaacgtcagcaggccattgaatacatcatatctttaggtcttgatcccgaatcactccttgctcctgtaacagctgatacagtgaaaaccaggcggaaagccaaaggcggagtaagaaaggctaaataccgctttaaggatgaaaatggcgagatcagagaatggtctggtaatggcaagcgtccgcttgctttacagaagctgcttgatgagggccatttcatggaagatttcctcattgacaaactgcaacctgggcaggttgaataaaataatcgtgatgccgtcgcaaacaagtttgcgacggcaaatggaggggacagaacagccagcggcgctggcaagaaattttatcgtttgataaagagggaaaatgatgatcaaatcaaaaaaagtagtggttatttttgttgctttgagttcattcttgctggcagggtgtgattcaccaaaagatgctaataagcaaaactttgaaaaagctattaatactcgactagagaaggaatgcattaccattagtccgctgggaatatttgatagtaagccttatccggttcaggtagctgtggctcaggctaatcgatatacatctcaggaacgggcagatgaaataaattctcgacagttttctgcgctggatgtactggttaaagccgatttattaacagtaaaagataccctggttgatgacgttattggttttactaagacgggtaaaaaagtgcctggtcgtgaatatgctctgacggatgaggggaaaaaatatctgaagtctccggaacgacctgatttttgcgtcggtcattataaggtggatgagatagttgattttaccgaacctggtgatgctatgggaatgaagatcacgcaggtgaattacacattcagtcccaccagtatcgctgaatgggcgaaacgcgatgatgttcgggctgcatttttaggacttgagtctgatttgaaagagaaacaaacaaaacgtattacactggttttgaaaaatgatggatggtctgctgaacggtaggctgtaatggtgttgctacgtgaaaaatacccctcgtatatcccctgctttttcacggatttcacgtagcgcaccgccgttaatgactctatcaaaaatactcaccgatatttttcgcactgcaaacaacctaactcactgtaaaacaacaaatcagctttgcgccggtgacgcatcgatcgcgctggccagcgcgatcctcagctgcgatcgctacagtatttttgaacaagattaccctcgctccggtttaattcgccaggcagttagacaggcactgttgcaaatagtcggtggtgataaacttatcatccccttttgctgatggagctgcacatgaacccattcaaaggccggcattttcagcgtgacatcattctgtgggccgtacgctggtactgcaaatacggcatcagttaccgtgagctgcaggagatgctggctgaacgcggagtgaatgtcgatcactccacgatttaccgctgggttcagcgttatgcgcctgaaatggaaaaacggctgcgctggtactggcgtaacccttccgatctttgcccgtggcacatggatgaaacctacgtgaaggtcaatggccgctgggcgtatctgtaccgggccgtcgacagccggggccgcactgtcgatttttatctctcctcccgtcgtaacagcaaagctgcataccggtttctgggtaaaatcctcaacaacgtgaagaagtggcagatcccacgattcatcaacacggataaagcgcccgcctatggtcgcgcgcttgctctgctcaaacgcgaaggccggtgcccgtctgacgttgaacaccgacagattaagtaccggaacaacgtgattgaatgcgatcatggcaaactgaaacggataatcaacgccacgctgggatttaaatccatgaagacggcttacgccaccatcaaaggtattgaggtgatgcgtgcactacgcaaaggccaggcctcagcattttattatggtgatcccctgggcgaaatgcgcctggtaagcagagtttttgaaatgtaaggcctttgaataagacaaaaggctgcctcatcgctaactttgcaacagtgccgttagacatacaggtcattctgttcagcatagtgaaaatcagaactgagctatcacgactctagtctttccttcggtatctttcccctcaagatcgtctatcacacctttagggttagtcacccaaccttcagggtcatatacaaagcatactagcgtctcacagtccggatgtgcacggtaacgggccatatcaatgagcagttcctctccaattttatttgcccctagagagcggcgagttttcttcacttcaatgacaatcttctctttcttcagaagaaaatcctgtctggatgatgaacctgcgaagctaggtgaattttcttcaggtctgacatcattaaaatgcagcagcagaagagcatgaacaagatcctgtacatcatactcgtcattaatttcaagcggcgttctgtcattgtatcgttgctttaattgacgacaaaaagctggaaatttattgagtatatttataatcaaatccagttcggcatgttttgttgctatagtcgatgccgtgccggagtaagttaaatcgtctctggctgcatcaaaaataggtttgtaatgtctaaccaatccctgataattactagaccaagcaatcctttgtgtatcattaaaatctttgtagtaatcagattcctttccataactgtcttcaagtaacttttttgctcttgcaatccagttattacctttagccgaatcaatatattcctggcttctgtgactaaatgcacttgttcccatatattttgtcgacatgacagaattgtactcttgttcaagcacttcaaatctttcagctaaggtcttcttcgtcatagcgcaatccaaattatatgctaataatacctgtgaattttaatattctaccatatctggctttcttccgttcacattggacattcaggtaatttcgtccagttctgctggctgtgctggagctggcctggtataatttaaccagccatttcaacagcggtggtgtcttatgaacgtcaagaacatgttttacggtgccattctggtaagtgctgtatgggcggttattttgctctcatggtttgaatccagccttaccttaagcgattacctcaggtacgaatcggtaatcctgatcccatgcctgctgtgggttgctgtttatgggttaggtaaacgttacctccaaagaacatcaaactagccgcgccagcgacttttttacaccttcgtttaattccctggctcacctggacagccagggaattctgcccagcgctactggcttgctgtgccaaactttccgttgcagatttcctcattcacaatggcctgaaacatggaaacagaatttctagccttatccctcagtgcattaatgagttctgtgtcgtgtattttgttgtagaaaatgaaagtagaaacatcaaactggagtttaaatgctgctttccttatggctaaacctgacgtgatcgttatctcattatgtatgcgaagataggcaagataatcatcgttatttgcttcacactgctcatataaatatttttgcatgagagattgagacaaggccagaaattccacatatcgtttggtttttatttctttatcttttaatccctgtactgccgcttctttttttaattcgtgcttttgtgttagcttaagagtcagccacccccctaaaatagtcagcaacgaccccaaacctatttttacggcattatcagccacatccacccactcagtcgccatctgttactcgttcttcctgtgatgatcatggttgccagtataattccagcacagactggacatacagcattttctgtccagaccttattagttacaacatacactgaattcatttcctttatctggtgctctgctccggcatacgcgcccatatcctgggtaattcaggataacttccagatttcgtcctgccctgccgttcatatccgcctggacaaaaatgcattatcggaaaaaatgtccaaaattttttttggtgatcggaatttttattgtcggacgcacctctgctctaggtcataattgctgacacatcccaaaaaaacaggtgcggagatttaaaaattgagtcacttacccgccaaaattttccagatttcacgtagcgacgcctggaatttaaccatctctcccgatgcagcccgtaatatgcgggatctggcggcacagattggcgcaggaatgccaaaatatctgatagcaccggaagtctcactgcttctctcctacatcgatgatctgaacatccgtatgtactttgagacgctctggaataccggagcacgactgaacgaagctctggcgctgaaacctgccgattttatactgactccgacacggcagtacccgcaacccgtggtgatcctgaaaacactcaagcaacgtctaaaagaagcagaaagaagaccaggacgcccgaccaccaggcatccaccattacatcctgatccgcgatacagaaaaccaccggagcctgctgtaaggctggttcctgttctggatgccggatacgcattgcgtatgcgggaatacctggcgacctggaaaaagcggatcaaacatcagcctgtgtgggacataacatcgagacagacaccgctgaactggataaacaccgcagtggcacgggcagagcgtgacggcgtaacattttcggttccggtcacgcctcacacgtttcgccacagttacgccatgcacctgacaatgagtggcgttcctccgcgcgttctgcaatccctgctgggacaccgttatgcaagaagcaccgagatttacacccgcgttttttcgctggacgtcctgacaggaagtggcctgtcctttacctgcgatccacggcgagcaaaacagcttctcggataccctgaacgcattaatgatgagtaataatacacatcattaaactgttgccagcacgcaatagtacggttatactttcaccacaaaagattgtgtattaatacacactatttaaccgggagggttttgtgatgggaaaaatcattacagttgcagggcataaaggcggcataggcaaaagcaccgtgctttgttccttatgtgtctgtgccatcaggaaagggaaaacagcctgtttcctggaaacagactcgcagggaagcatcaaggacttcattgaggaacgtaaaaccaacgagcggctgtctgaaataccgtatttcgagtgctacacagatattccggcgatggcacgaaaactggctgcccgctttgattatgtgtttgttgatacgccaggaatgaaatctccggccttcgttaaggcactgagttgtgctgacattctgttcacattcattgagccaggagcaggcatcgagatcaacacgctgggacggctggttttcgacattaaaacagcacaggccggagtcaatccgtcaatgaaagcatggattgtcctgaataagtgttcaactaatccgtcagacagtgaagcgtcagaactgcgccgacaactcaatgatgatcctgactggcttccggttccccgccagcgtatctatatgcgtactgcgcataaaaaagcctataacagtggtatgggcgtacacgaatacgatgataaacggggaaacaaagcccgtggagagattgaattactgttaaaagaaacggatgttctgtaatgtgtattattacacactataagcgatgatatactcacacccttaatagtgtgtataattacacaccttactaaaaacaggataccgaatctaatggcaaagctcccaaagaaaattgatcaggaaattaaaccgctggatttacgccagtttgtaagttctgctgcacaaaaaccagcatcggcatccgcagtaacgcgtataaatctgactatgacagatgatgatctggatacagcgcaggagttccagaacaagtacggtgcaagccgtgctgaagtaatcagagcagcactggcagcgttacgtctggtatcagcagaagaacgtcggaggctgtttgatgatataaggaaaaacagcccgaaagcaggaagaccaaccgtgaataaatagagtgttttattacacactattaaaggggataaaaatatgctcataaagataattaaatctgtattcaatttttacatgctctgtgtgcagcctgttattggactggttcttgcgggttatggtgcatggaaattttcaggtgacagtatctcagcattactggaaccagcatcgtactttgtcattggaactgttgttttgtttgtatggtatatagcatggcaaaaagaacgttctaaagaagaagagtttaaatcaagtataaaaccagaagattttgtgaagtgacgatacgtaataataccagtttataatcagacattagggcactcaatctatggaacactgcatctttgatttaggcattataaactatcatcctgtcattacatggacagtaccagttgcatttttctttttagtattgctggctggtatagtattcaatattggcaggaaaagtaatctaatcgttttcatcctggcaatgttgctcccagtaacaacggttttcatttttatgttactgggcggtaagatcgatatgtgctgaccaattaaaagaggattaaacaatgataaattcaatcgcgtttaatcttatagcgttatgtataatatatatatcatcactatttaaaaaaagtaacttcagaatattttatataactgtatctacgtgctctttattattatcatgtgtaccaaacaagtacggtatgattggtatagcagcattggtatttacaactatgttaggaccattattaattattttagaggataacagacaataaattatgacaatgcgtttgttaagcccgcaaatatgtgggcttatttttaatttctaatatttttactcttcatcatcccgcaggaactgacaaaagtcttcgctccccatcatatcgacagtatttttaaattcgaaaaaagaaatttctgtcatagcacacacacgctggataatcagttttttcttttgctgtctgacggttgcagtttcaccaaactggataacagcaaggactgtttcatcatatgatttcaggacaaaatcacaggttatattctgcacttcacggattaattcttttacagcttcctcgctaccatgaggacgaacaaattcaatgagtcgtattttgggaaaaacggaataatcaggtataatattacgtgaaagaatgcctaaaaactctgattccttatttgagagtaagggtactttagtaaaacaatcaacctccccaatggctgtaaaagcattggttgtcaaagctggattgttcttaataaaatcagagaatacattttcagttgatggcaaaacaacagaagaattctgttgttcatctcgttttttattacggttaaatatcatttcatattccttttaaaagagcctgcggcaggcacaggcaaaaacatcgtttttggacaatcatggataaaatgttaacattttgaccatgattgtctatcctgcattgttctttactgtctgtaagatcggcgctcattcttccggcgttctcccgataccaaaaagacggaacgcaaaacggctttcgatccaccattcaaaaatctgctctgcgcaaccacaaacagttaaggcgatccatgcagcaagaacaacgtaaccactgacatctgcgcccatataccaggcgatagttaaacccatcactgcgataccgcctaaaaactgcaacaagaaacgaaatcccgcaagaatccccaatggaataacaacaaccagataaaggaaagcagccagaaggtatctgacaggtgtcagcagataaaagaacctggatgttttctttttgtcagaataaacggcatcatttgcaacatctgttgaatgagcgcccaggtctctcctgatacgttgaaaatccacgatgttatctttcatatcatcctctcttttaagtgagttataaaaagagaaaaaacgggtaacgtaaacagcagcattctttaatcactaaaccagaacgactcttcgaaatcccatccggttatttcatgccataacttaaccttctgaagatctggccttgataattttaacttatcatcatattcccttaaagagataaggtaatttttcataacatcgatacatttttttgcccaggcaacctccgcagagcttcctttaatgacccttggtcttgatggcaatcgaggacgtaacggtttagttgctattttttttccatcatatgtttcattctctacaagatatgtgaacacaacagactcgatctttctgccggacttgataccttcataggtaacactcagattcgtatttgcattgataatatcaacagcaggatcaagcacccgtttcttaaaatccttatatactggatatttccctgtaaggccggttcgctccttcatccattcaatggttataggatctgtcgagatcactccactatgtttcttatttcggttcagattcttatatttatataaccacgaataaagtcgaaatgaaaatggtgtatccagtttcaccatatgttcaagattcatttgtgtaaattcgcttttcagttcataaagatattgactgaccgaatctgaaaaacgcaaagttatgtcactttcactattcccaacaccatatcttattgaagaaaaccagaatcgtttgactgcatcgatccttttttttgcctcgttccattcatacgtaacaattggctttgagcctaaagaactcgcagcagattttaactgttcataacaatttttcgaatctaaagaaaaagtgtccctgtattccttcgcaaacaatgtatattcatttgcaggctgcggtttacggctatcaatcttagtcaatgccagatacagaagacgcatttcaattagcgttatatcgtatgcaccttccagcaattgatttccctgtgccaacaaactttgaacatcattacagtcgctatttttattattctttaagaccatacagatccccttcctgtgagttaaaaatcaaaagaagtttctcacacccaaactagggacgcaatttttttttgtccccacataactaataaaccataaatctgtcccctgtttgaagagtcaaacctggctgaacggcgcattttcaccctcagtcagaggcagtcaatacagcaaaccagaagggaatgcatcatcaaaaacccatcgagccaaacatcttaaatgtgatctaagtcactaatccaattcagattcatagagaatccataacgaatccgagttgaatctaaaaaagttatccacagcctgtggataaaaaagttatccacactaaatctgtccctagttgaccataaatctgtccccttttaaccataaatctgtcccctgataaaaacgcaaataaccataaatctgtccccttttaaccataaatctgtccctagttagcattacaattaattgaaaaacaaaagaaaaaacggccctgaaaaaggaaatattatatgtaacataggagtgatctatcttttagaaaaaagaaattagaaaaaaagaatagagcgcattgtgaattttttgagttgaaatcagcaaaatcacaagatgaggtcagaccagagcgtacggattcatatgctgcatcgaagacattccgcttcctcgctcactaactcgctacgctcggtcgttcgactgcggcgagcggagtcatttctcacatatcgctggtaattctgttgttgttccttcggtgatgagtcgcttgatagcctctaaaacacgctcagacgcacgaaacggggtttaaatgcccttcaggcatgagaggcgcgaaaaacgcttacagaggctttctgttcatcagaatctgatcctgtgaagaccgagaaagttctcatgtttagtcacaacctgaatatttcattccgagggcggtttaatataactaactgattttattgaatactatgaaagagttcttttaattatgatcctcattttgctaaccgaggatcttctcatgtttcaataaaatacctttaatatcaacatgatatgttattttgccaattgatttatgtgaccacatcatttcaacgatacataaatcaacagatccagtaatgccccctccccaaaatgacacagagaagccctgaatcgcgctctgccgcttcgttcggtacaaccatgagggaaaccatgcaaaataaaaaaaatcacttagaacgcgttacagagcgttttaaggcgatgtcggaaagagccatatctcacctgttctgatgtttttttaacaagcacttttaagagtgcttttaaagatgctattatgccaatgagacaagcggagggcttatgagctatcaaattctgacaaccacagcggccagtattactgacctgaaaaaaaatcctatgggaaccgtagctgaaggtgaaggggacgctgttgcgatcctgaaccgaaacgaaccggcgttctattgcgttccaccaaaactttacgcctactatcgggaactcgctgaagatgctgagttaaacgctgttgctgatgagcgcatgaaaaacccggaaattgtgaaggttaacctggatgacctatgaactggcttttgaccgcagagcactgaaggaatggcagaaactcggccacaccatccgtgaacaattcaaaaagaaactggcagaacggctggaaaatccacgcgtacccgcagcccggttacatggtcatgctgatcgctataaaatcaaacttcgtgcatctggctacagacttgtatatcaagtcattgatgagaaggtcgttttacttgttattgccgttggaagaagggaaagcagcgaagtctatcagatcgcagatatgcgctgaattttttagagagtgttgtggaaatggcatatgacgaaaatgtgaagtcgcagaaaaatcattatccggcagccgttgagcacaacgccgccatgattgaagaactacgtgcagatcctgattatgcaaatgcttatcttgctaatgccctggaagaaataaacgagcctggtggtttaggtggttttcttgttgcgctacgtcaggtaatcgaggcgcgaggggggatttccgaagctgccaggaaatctggccttgcccgtcagagtatttaccgcgcattatcccccaacggtaacccgaccatcacaacgcttgcacaacttacatcggtagccggattacagttcactctcagtaaatccagccactaatctctccagttccccctaagcgggggaatttccatgccatcaaaaccgcagttatcccgcccgacgttcacctgtatttaatcggcaaatcgtacaattgcgtactggtaatagtttaatggtgtgtattaatacacatccaaaggcgatgcgatagatgcgtgtgttaatgctaatgtatgcatacattagcattaacatagagcagattctggcgcgttgcgcccgtagctcgctgacgctcacacgcgcagtacagcgccccgccatgctnnnnnnnnnnnnnnnnnnnnnnnnnnnnnnnnnnnnnnnnnnnnnnnnnnnnnnnnnnnnnnnnnnnnnnnnnnnnnnnnnnnnnnnnnnnnnnnnnngcgttgcgcccgtagctcgctgacgctcacacgcgcagtacagcgccccgccatgctgcaatgcaccagggcggggtaaactcgcttgcgctcgcgctaactgcggcattctgcggcgcaaatcagcataatcatagcctgctggtcagttgggctttgcagggtgaagggatgtcctgtgcgccctggtacgttcatcagcggctgcgccgcgctttggggcgatgtggctcctgtgctgccctggtattttcgttcgccccttccatccgcttacgcggattaaaaaacgtgataacaatcacttatcgagtaaaaaaacgggagaacacttgcaaatacgacttaaaggtcgtattattgtttcatcgaaaggggaatggcccctctcacaatagcccagcagggcaggagatttaaaaaatgaatatccaggaagcattaaacgtttttggattatccggcgaattaactgaaaaagatatcaaagcagcatacagaaaagccgctttaaaatatcatccagatcgtaacccgttaggggctgaactgatgaaagcggtaaatgcagcttttgatgtattgatggcaaatattgataaaataaatcagttccagagcactgatgaacatgcacgatataattacggtgatgacctggaaaaagtattaaatgttctttctggtttatctggtctggtatttgaagtgataggtaactgggtctggattagtggagaaacccttacacataaggaaactttgaaagaaatcgggtgtaaatgggcggcaaagaaaaaacaatggttttatcgtccagacgaacataaaagttactggaatcgtgaagaacacacgatagaagaaatccgcgcaaaatacggtacaaccggacagcgcagggcgacagggtggcaacgcgtggaaaccagagcgtaaccagaacgggggcgagaagcccccgatattatagccagcccgtcttttggggcatcgaacccaaaaagacgggaacagcagccacgtagcaaaaagggaaacagatgaactctttttttgaacaatatcaccctgtctttgaagttgtctgccgtatcctggggaacggctggcgcgtgaacaaacttgatgattgttcgtctcgtataaaactgacgtcaccgcagtttaaaaattactctgtgcatattcggatggaaaaagaccggttttctgttgtggggagtgtggatagtcgctcctggcgtagtccgcatcatgtttgcacgttatccagaaaacggaatcccgttgatattgcagccgatatcgagcgaaaaattctggtaaatgcttcgcaggaggtgttacaggcgattgagtatgagaaacaccaggtggaaaaaaaggacgaaattctgatcctgaaaggtatgttatcgcaacttgtccagcttgaaagctggtatggggcattgacaggctttaaagctgaaaacggattgaacggtaaagtcaccgaacagggcgacagttatgatttacagattcggggcttgagtatagatcaacttgttaaaattacagggtatttgaaacagttatgagaaaaaataaaggtgatgtgacttattttcttgaaaaagaaggtgacaattacaggcttacaaaaaggataaaagccagaacaaatgttaaaatcgggaacaaaactacgaaaattacattgtatgatgccgtactgaatgagaatgaattacaacatattgattttacgtgtgccggattaagggaagacgatgagacgccagttaagaatttaattaaggagtttatgttaaatgaaacccgataatacacctgaaaatgtaaaaaaattacgtttaaaagcaggattaacacagaaagaatgcagtcatatttatggtgttgggctaaggacctggcagaaaaaagaggaggttaatactcaaaacagtcaaagtctgtcactggttgagtttgagtttcttttgttacttgcaggagaacatcctgaatacgtgctctgcaaaagggagtcaaaataaaatgacctgtgatggttttatattagtacctggagttgcgcccgtagctcgctgacgctcacacgcgcagtacagcgccccgccatgctgcaatgcaccagggcggggtaaactcgcttgcgctcgcgctaactgcggcattctgcggcgcaaatcagcataatcatagcctgctggtcagttgggctttgcagggtgaagggatgtcctgtgcgccctggtacgttcatcagcggctgcgccgcgctttggggcgatgtggctcctgtgctgccctggtattttcgttcgccccttccatccgcttacgcggattaaaaaacgtgataacaatcacttatcgagtaaaaaaacgggagaacacttgcaaatacgacttaaaggtcgtattattgtttcatcgaaaggggaatggcccctctcacaatagcccagcagggcaggagatttaaaatgaaatgctcatctgtttttacttcaaccactaatcatgttttcacattcgaacgagtaacgctttgcactattatccttatgcataaggatacgggacaacagtatgttgtcatatttactgataacaataaaattcgtgactataaaaccggaattgttcctcagtttggcgaaattaagcagagtgatgttgatttagtccttttctacagggacgaatatgaaaaatattttgattcgttaaaagatggtgatgaatgcttgagttttaaagattttattgagtgccttcgttaagcattataaatgcaggggggggaaccctgcattttctggaaatttcaatattgattcttaaattgtctattaacatcaatgcaagggaaattcatgaaaacgttaaaacaagccgcaatgcagtttgcatctgatctgcgtaataatcgctgttttaaagctgcttataatgatgctctgttagagcttgatcgggaagatttaaacgccattgtacaatgcacatttctttttgagccaaaacgaacattagccgaacttgataaattaattaaaaagatagaagtagaagaagattatgagttttgtgtatcccttgataaaggtaatggattacacgaagtcaggatatttaaaagtgagcgtgaggcgttggatgcttatcgcattttgactctttacggatacacagtaactatagaaaagaaggagggtaatgactgactattcaatgtgtgatcaggttgttccaccaacctgatcacgttatcgacaatcaaaactgaatgaggtttttaaatgtcaacgcggcagatcgtacagcttgctgattcccttgtcaaaggctgggaaaccagaattccggcaatgaaatttagtgaatgggatcaattccggtggtggttaaactacttgcaagggtatgaaatgttttaaataaaaaaaggggctttctgcccctttgtattttttgacaaaaatgctatgtgtaactataattagttgcatatctataggggatggatttatggggaaaacagataagctactggcaaagtttttaaacagtaaaaaaacgtttgaatgggatgaactggtcgttttgttttcctctctggggtatgtcaaaaaggaaatgcaggggtcaagagtgcggtttttcaatgctgaaatcaatcacaccatattaatgcatcgtccacatccggaaagttatatcaaaggtggtacgctgaaagcaattaaacagaatctgaaagaggctggattattatgaaacatttaaaatataaaggatatttaggcacggttgaacccgattttgaaaataatgtcctgtatggaaaactggcgtttattcgggacctggtaacttatgaggcttctacattagctgaactggaacaggagtttaaaacatctgttgatctgtatttacagtcttgtgtggaggatggaaaggaacctgataccccgtttaaaggcgtgtttaacgtcaggcttgatccagaactgcatcgtcgggtagcagaaatggcgatggaagaagatttatcgttgaatgcctttgttaataaggctctggaaaaagaagtcagcaatcatcgcgcaggggcttaattgcccttgtttttttatgccctgtaagggcatgggaggcgctttgcgccggaagccccgcagcgcagcgaggacttaaaaagcgttacggcttcagccgtaacaattcccagccctgccaggcctgttttttctttcacaaatctttcagctatacgtttgccagatggtcgaagacgaaagaacctttcagcaacgaaatctggacatatgccgagacgattttatagccatgcacagtgtcacatatggtacaatcaatgcaggatagacaatcatggtcaaaatgttaacattttatccatgattgtccaaaaacgatgtttttgcctgtgcctgccgcaggctctgttggggtgagttatgaagatgatagcgttcagacttagtgatgatgagttaaaacttgcagagcataacgctatatcaagtgggtttaccagcatcaatacatttgccaggcataatgtgcttaatgttgatgttcaaccatcaaatatacctgtcagcaatgaatcatcaaaggctgttaaaacctgtttataccctcatgaaatagaacttgttaaacgtaatgctgcccttcacggcatgagcatgagcagagaaattgctattcgtgtgcgtcagtctttgttaaaaaatgaagtctgtctttaccctgatgaagttaaggaacttaaaaaactatcaactgctgtagatcgtgttggtcgcaacattcattttatcataaaaggtgaaagattctgtacggttaacgatcctgatttcagaaaagacgttattgaagtgattgaactgtgtaagcaaattgattcaaaacttgaaacgttaaccaagagtgttgttaaccgatttgggtgatttatgggtgtgtatgtagaacaggaataccgtattaaacgcgctaaagggacagggcgtgatccgaaatctcctaagttatcaggaagacatatacatgccagtaaatcggcttttaatcataaagtcagacatggcgcagacaagaaagcatatacctggacgccaacaaaagaagtcacttttaaaatcactggttcagggaaaacagccgcaggtatcaaaaacggtattgattacattacccgtaatggtgaacttgaggcttactgttatgatggaaaaggttcagagcaaacagggaaaggagaagactttaacagggagtttacttcaactttatctaaaggaaatgattactccaggacatatcgtggagaaaacatcgatcatgtgaaaaacatggtcttttcaccaccaccagaagctggagtaagcagggaagacgctctgaaagctacggtagaatttcttaaagagacttatccaaaccatgctttcgttgccgtataccatgatgataaagaagatcatcctcatgtacatgttaatattaaacttcgtgatgaagaaacaggaagaagattaagacttactaaatctgaaaccaggaagttcagaaacggttttcatagaaaactgaaaggtatgggatatgatgttaccgctacctggaaaaaagatcccgaacgtaaacgggagattgagcgattacaggctgaaaatccgaaaagactccggaatgtttacaaggtggtggattttggggagacttcatatcagaataaggcaggggaaaaacgaacacctttcctcacttatgaaactttaaaaggtggaaaacaggttacgatttggggtaaagacctgaaaaatcatttcgagtctgaaaagctccagccaggaacgcttatcaaagtaaaaaaactggctcctacgcttgtacgtagtccaatgtttaatgatgatggaactgttgcaggctacagggaaacgcatcgcaataactggcagattgaaaatattgcccttgagcggaacagagaacgtcaggttcatgagcgtgaaaccaggcagccggaagagagcgacgttaaaaagcagctatccagaaaacatgagcaaggtcacaatatcgggtttgctcttgaacacgggtttacaaaggattcagaagaacataaaaaactaagaatacagcaagagaggaactggaaaggcctgggattttaatttgattttggcgcaggtgaacaaagcggctactttgctcacctgctaatcacaacaacctacatgggaggttatcatgactaagcatgatgctatacgcatttcgcaacttcatcaaatctttccagaggttcagttaactgaacgacagaaagatattgcagtgatgtatgtaattggttgcacagttgaggaaattgcgtcagaaaaagggatcacgaccgatggtgttatgtatcatttgaatctggtaaaaagagccgtaggtagtgcaactctggtaggagtgcgcacaactgcgtttcttaggatgatggcaatcttattaacaagggagtcataacattatgagttatatgaaaaaaacaagaattctttcgttggttttgttctcaattgcattgagtggttgtggtgaggacatcaagaccgttgattggtggcgaaatcatccggaggaagcgatctcgaaggttgaagagtgtaagaagtcaggcgacgtatcggataattgtaaaaacgccaagactgcgttgtacaagaatcagcaacaagatgcgcctgtgcctcaaattaattaaaagatacaacccaagcaggtgttgatactaaattatagccgaccagatggtcggtttttttgtgtcctcacataagagtgtccactaaagtttctgtagttgtgtagtctctttattttgataatcctatttgcatctagaacgaatctaaaacatgtccatagtggattgattaaatgaaggagaaaccagataagtcatcggaaaaaggggtttatgtcacgataaaactcgatcccaggttgaatgcatttatcgaagagaaaacgaaaacatctttgcttagtaagaggaagcaaattatttacttattaatgcagagtatgcgtattgatggatatatggagcgttagctatggcgtctttattcccagccttgttgctgtgtgcggcgtcagttcatccggatacgataaatgatattgcacgggtcgagagtggcttcaatccttatgctgtggctgaaattattcctgaaagggaacgcggtagctatggcaaaagtgttatcagtcatatgcccaaaagtaaggaggaagctctaacagttatcagagaaattgaaaacagaaaaagacgttattctgtcggattgatgcagattaccagcagtaatttttctttttattccacgtccgcagaaaaactccttgatccgtgtgaaaacttgtctgttttcgaaaagattatcgtggattgttataaacgagggaggagcctggagaatgcgcttagttgttactatacaggaaattttagtaacggtaagcgaaaagaaaaagaatttaataatacaagttatgttgagcgaattggttatacagggaacgaaaaaaaatatgttgtaccaggtacaagaagcaacgggggagaacagcgaaaaaatcgttcacacaatgcgtcagttatctggcccgaaaccattctgaaatctgcttttgttgataactcacatccaacaaaagttattaattaacaggacttataaaatgtcatttaagaaatcagtatgtaatcgtatcagttcatctgtcactgctgttatgcagcgtaaaaataaggtagttatggcagtcgccggggcaacagtcgcatcaccagcctttgcggatggattttcaaaagcggaaacactgctggaaaaggtcaaaacagggcttagtggcctttcactggtcacggtgactattgcctgtctgtgggtcggctacaaggttctgtttggtggaagcacgattcgtgaatgctcacctatcatcatcggggcaattgttatcgccagtgcggctgaagttgcatcaatgatggttaactaataaagcggggacgatagtatgtctacactttataaagcgatgacacgccctgctatgtatgtgggtgttcctgtcgtccctcttactgtggttgcaggggcgttatttctggcgggggtttatatcagcaagctgatctggctggctattcctgtcgcagtttttattctcagaatgataactaagcaggacgaccacatttttaatctttactttcttaagctgaaaatgctcggaaactcagtgtgtaatcgtttttttggcgcacgagcgttcctctccggacaatatgaagctgttgaaattgatgagtttattaatgccatgaaactgaatgagcgaattactactggtaaatatataccctattcaagccatgttgataaaaatattgtcaaaacaaagaacggtgattatgtagcgacatggcaactgatggggattaactttgagtcaatctctgcggagatgttagaaactattgactcacaggttgccactcttgttcgttcattttccggactgcccgtttcattttataaccattcatgcagggcgagtttttatgatgcctttaccacaaaatcaggtaataaatatgctgatataatatcagattgttattatggttcgatgaagaaaaataaattcaaggggaacacactttactttacgctgatctacagaccagacgggcgtgtagaaaaactggaaaaacgcaaaaaaagtattaaagaaaagaaagatgatattaacattcatgtgaagagaatgaatgaaatgattaatacattctctggcgctcttgataaatttacctgtaaacttcttggtatgtatgaggagaacggaaaggtattttcttctcaactgtcattctataattatcttctgacagggaagttgcaaaaaatcagagtcactgattctccggtgtataacgttcttggtggagtggatgtattttttaatcatgataccggacagatatgccgcattgatggaaataaattctttcgttctattgaaattaaagatttctgtagtgagactgcatccggtgtttttgatgtgctccagtattctgatgctgactatattattacgcattcatatacatccatgagcaaatcagaagcattgagtaccattaaacgtgcagaaaaacagttaaagagtacagaagatgatgcggttactcaattgcaggaactggaaaaggcaaaaaatgatattgtgtccggtgatatatcctttggttactaccatttcacgctaatggtaatggcggacagtatcagggagcttgacgaatctgtaagtaaaattacggcagactttactgacctgggcattattccggcattgtcaaccatgtcattgccagcggcatattttgcccagcttccggcggtttttcatttaaggccgcgtttatctccggtatcgaatgtaaattttgtcgaactggcatcattccataatttctaccaggggaaacgcgataaaaactgctggacagaagcggttgctattctcaaaacaccaagcaaacaggcgtattatctgaatttacataactcagtactgtttaaagatgaaagaggtgaaaagaatcttgctaatactaaagttataggaacggcgggttcaggtaagacaatgtttctgtcatatcttgcctgttcattacagaaatacaataaccccgaaacttttgctgactctgcaaaaaataagaagttaacgtgtgtctttcttgataaggacagaggggctgaattatgtatccgaatgcttggtggggaatattacaccgtaaaaagcggtgagccgacaggatggaatccttttgctctggaggcaacaaaacgtaaccgtatttttgtcaagcaactgatggagattctgtgtaccagaaatggtgaaagattatcgacaagagaaagattgcttattagcgaaagtgttgatgctgtgatggattttcctcctggcgaaatgcgggaatatggcattaccagaatgcttgagcatcttatgcagagagatgatcgggatgagcaggagaacgggattatccttcgtttgtcccaatgggctaatggtcaggctcatggctgggtttttgataatgctaaagacacattcaatattcagcatgtcaataattttggcattgatggcaccgagtttcttgatgatccgatggtatgtgcaccaattactttctatctgctgtatcgcattacgcagcttctggacggtcggcgtcttgttatcttcctggatgagttctggaaatggctacaggatgaagcattcagcgattttgtctataacaagctgaaaacaattcgtaagctgaacgggctggttattccggcaactcagtctccggatgaaatactgaagaataagatttcacgggctgtggttgaagtatgcagcaccagtatttatctggctaaccctgatgccgattacaatgactatgtagaagggcttaagctgacaccagaagaatttaatattgttaaaaatcttgatccaatgtcgagacaattcctgattaaaaaaagcagtcttaaaaagggagatggtaaatcattttcagcacttgcgacactcgatttatcgggacttggtggatatctgaaaatattgtctgccagtgcagataatctggaaatttttgaaagtatttatcatgaaggaatggagcctgatgactgggttcctgaatatctcgaacgggcaatctgacaggtgaatttatgaaacgtgtaaaaacatttatgctgatatcattattgacggcttcattttatagcagcgcaggtattccggttgctgtagatgccagtccggaatgggctgttgaagccgcaagatggacagaacgactcaaacaatggtctgaaactgcgcaacattatcagagtcagattcaggcatataaagaccagttagcaacggcaacaggtataaggaatattgcggcattcacaaatgaactaagtaatctgcaatcagaactgacaaatatttataagcaggggaacagttatatttctgattttaccagtaatcccgaaggtgcattaagcagtcaggcaaaaaatctgttcagcaagtatggagccttcgatatgtgcactacaggctatgaacgcaatgataatctctgtaaagcacggattgtgtcaaaggctgccagtattgaacagggaaatgagataaataagcagttatcaagtgcaatgtctcagattcagagtttaagtactcgaattgaggcttcaaaggatatgaaagaatcccaggatttggctaacgcattacaggcacagtcgttaaaaatgcaggcgataaaaatgcagtatgatgtctggaatagtaaaaatcaggctgacacggagatgttgaaagaacaacaaagggctgaatataagcaacaacagatgaacgcaccaatacctacgattcaatgagggaaaaggtatgtcattctttgttaaatataatacaaccgttatggaagcaattgataaggttggatctacttatcaaagtcaattcacacaagatataatgtcattagtgacagcatctgtcacgttatatgtactatggaaaggctatcaaatactcgccagtaaaactcagactccgatgcaggatttagtttgggatttatcaaaatttgcgatcataatcatgtttataacaaatgcagatggatatttgacagcggcaaccaatgcattgcaaggcatgaaagatgggctttctggcggagttagcgcatggcaaaccttagataacttatgggagaaaacacaaaatcttgcggaaaaggtatatcaaaaagacactgatttcattcctttggctggcgcattaggtatgacgcttgtttgggctggctcacttattttaatgacaattagtgctgttgtttttttaactgccgatattacgatgaaattccttattataacagcgccaatatttattttctgtctgatgtttggttttattagagttatgtttaataactggttgcaatcgctattttctagcatcctgactgtgttatttgccagtttagtaattcggatagctatggattttcagggggatatattgcaacaagtatctaatgcgacacccaatagtaatgttatgaccgtaagtgcaatgggatttttagccggattgttgggagctttattggttcttatagctaaaagttttgctgtccagttagcaggtgcaggtgttgaaggtgctgttcagggcgcagccatgatggggctgggtgctgctggtatggctactggtaagtctctgatgcttggcggtcgcgctggtttaggttttggcttagggatggccggaagaacgggcatgaattctttatctgggaaagcagggaatctgatggggcgtggtgcgcgaacagccgctgaatgggcgggtgaaaagggatatcaggcgctggctccgacaggtgctttggggatgaaggcgagaagacttgcatccctggaaaaagcacgagcgaggaatgccgcatgaatataatgaaacgttttttttatgtgatgtccctgaactggatactgacgtttgttgataaacatatcacctccggatggagcaggaagagaaagctaataacccagcttattattttaatcacgggaattaccttatttaaggtcttaggtggaatcagtcagagctggttgtgacatgcttcattattttgtcatgatactttattttgtcctaatccttcttttaggagtgtttacctgcttcgcaggaataagacttggtttagggcttgcggggaaatggagaaagggtatggatcttcgctttttgcttcttattggtgggattctttttcttcatcttggcctttatctcttaaaggtgttcgtgaacgcttaataaggtgaatttatgcgatgtgtgattcttttgtttttcctgtttcagatttccggatgtaccacaaggaatacccttccttctgatgtttccggcgaactggaacccattaaccacagccaggtaatcagttatgagtgaaaaaatcgaaaagaagattgagacagctaaatccttcgaaagacaactctatgcagaaaatgaacggtctaagaaaaatgcatggcgtgttgcagtggcagcatcattactgtccttatgtcttggggctgcaatttgcgttcttgtgccattaaaagaaaaagagcttgctattgtggctgttggcgaaaaaacaggccgtacagaactgattactcaggttaaacaggaaaagatcctgcaatctgaagcgcttgggcggtattttgtaaacacgtatattactttacgtgaaggttataattatccgtctcttcagtatgattatgagactgtacagatatatagctcgaatacagtaaaggacgattatcttcgtctgtataacagcgatatggctcctgataaaatttatcataataacggttcttacgttgcggttgaggtcatctccaatattatttctgacgcaaccgcgccagataaactggcctctgtgcgttttaaaaaaacgacgagaaacttcacgaccggacaggtttcagtttcatactggacggctcgtgtgacatatcgttttgaaccagaaaagtcggttaaaagttccagtcgtgagcttaatcctctcggttttacggtaaccagttaccagacagatcgggaagtcaggggggaatgatgaagaaattatttattgctacatgtttattgcttcctgggcttgtgtattcagcagcgactccgttaccttctggatttgatgcaaggatgcagactgtgagttataacggtgcgaatacgaccgttatccggtcaaagacaggatttctcacatcagttgtttttgatgaaggtgaggctgttatcagtgcaaaggctggttttcctgccggatgggaaatcacaaccgatgataatgttgtttacatcaatccgcgtcccgttgttcaggaacaggaaggcgatgaaggcgaaaaactgaaaaaggttttccagccaacagaaaaggaatgggatacgaatctttttgtcagaacaacaaagcggatttacagtctggatctaatccttctgtcagaagaaaaacaagcgcaacctgcttatgttgtacaattccgctatccatcagaaatagcgaaaaagaatgcagaagaagtaaggctggcaaaagaaaaacaggaaaaactcagacagaagaaactgatttctgaaagttttgaaaaagccgatgcgcctaaaaactggaattatttcatgcgagtcaatgaaaaatatgacagtcgtcgtatcgcccctgattttgcttatgataatggcatatttacctttttaggttttaactcagggaaagtattcccagctccatttgctgtaagagatggtcaggaacagacacttgcttttaatgtggaaacaaaaggcaagtataaaattatggttatccacaacgttaatgacaaatttgttttacgctatggaaacagcgttgttggtgttgtgaataaatctttcggaaaagtattaaccgaccagaggaatacatcttctcctgcggtagaacgtgttgaggtgaataatgactgatatgaaaaaaacagatgatttagttgatgatgcgaatcagtcaaagctggaaagtaaacccgttcatgatatcggtgatatcaggaacaaaaataatcgtatgcgttctggctttctgtttggtctgatggctgtattagttattggtatttttgcgctgaaaacatataaaaattattttgcagatgaccagcagaaagcatcagaatcaacaggcgataccagcatttctcaggtaagtaaaatccgtactggtcttggtcagaattttgaccctgttgagaacaaagcaattatcaatccaggcgctactggttctggtaatactgtttctgacggtcataaagaagtgccacaggaggggttcaggaaatatttgtcaatacctgttgctggtcagggagggagtcagactggcgcgagtggcagcagcaggacatcgcagacatcagagccacaggaagaaaggaaagaatcaaaagaaaatgtgcctggtaaatcaggaatgaaagtaactgcgattaatctcgatcctgatctctatattgaggaaaacaggcttataccgtgtgctttaaccacacgctttgtttctgatgttgcaggtcgtatcagttgtgtttttacagaagatgtatggagtgctaatcaccacacaaaattactggaacagggaactaaggcttttggtcgttaccagaccggaacgctgaatcatggacagggcagaatgttcgttatgtgggagcagttgcggacgcctgataataaacgaatcgatatggtaaatacagcagcagctggtcccctgggagaagcgggcattgatggatggatcgattctcacttctgggagcgttttggtggttctcttatgctcagtatggttcaggatgtagcggcggcggcggcggataatgcacctggtaaagatcgtaatgtggattataccgaaaactcacgacaggcaatggctgaaatggctaaagtcgcacttgagaattcgataaatattcctccaacaatgtataaaaaccagggtgacataatcactattatggtcggggaagacattgatttttctgatatctatgagttaaaggtaaaatagtatgagtggcgttattcctgtcagcattagcaataaatcgctcgatttttataaaaatcaagtattccagtcttttcttgatattgaagggctaacagaaattgctgtcaaccgtcctggtgaaatctggacggaaattaatggtgactggacattccataataatgacagtgtgacctttgatttttgtaaacgtttttctcatacgctggcatcatttcggggagatgaaatcggcgagaccaagccattactttcagcaacactggaatcaggagaacgtgtacaggtcgtttttcctcctgcatgtgagagaaatactatttcaatcactatacgtaaaccatcgacacggcagataacacataaagaatatgtggcgaacggtttttatgattatgtccagtcaggaaaaaaacacaggacatacgatgatgagcttcttgatttattcagagcgagaaatatcgctgcttttatggagcttgccgtagcagcagggaaaaccattgtatttgccggagcaacgggttccggtaaaacaacttatatgaagagtcttatcgatttcataccattgaatacacggctgattacgattgaagatgcagaggaaatcaaattttttatccataaaaattatgtgcatcttttttacccttcggaatccggcagtgattccggctctatcataacagcagcgaaattaatcaaatcctgtttgaggatgaaacctgacagaattttactggcggaaattaaaggtggcgatgcctgggattttgtgaaagttgctggttctggtcacagtggaagcatgacgtccattcacgcggcctcggcaaaagatgccatcattcagatggtgacaaaatgttatcagaacagagaatgtcagaatcttccttttgatgttcttcgtaaaatcattatggacagtattgatattgttgttcatgtaggcagggatggtgttgtcaggcatatgagcgacatctattacaaaggggctgaatgtgaaaacttttaataagtcgcaatctgtttttatattcgctgttatgcttgttgcggcatggtttgcaggttcatttattttctttgtgctttacttcagccagataaagaatctgaaaccattgaaggctgtgttcagatccattgatgcgtacaggatggatatttttacagacagccttactttatctgttgtgactacggatatcagagttttagcctttgttgcacttggagcaggatttgtcgtgtctcttatcatccctgttgcggcgttgataaaactgaacgagaagaaagaaaatattttcggtgatgcgcgatttgcaacaattaatgatattcgtgagtctaacagtttcacgcttgacggtgacgaaaaagacgggattatcgttggtataaaagacaagaaaatcatacgctatgtgggagcagcattcagtgctatgggagccggaacaagggctggtaaaggtgctggtatagtcatcactaatcttatgaagtactggtggagtgttattattctcgatccaaaaagggagtgttttaatatcaccagtcttatcaggaaggtgattttaggtcatgaggtttataaatttgatccctttagtccggtaacgcaccgctttaaccctttgtattatgtcagcatgggaacgagtgaaggttttaatcagcttgaaaatctttcgttgattatttacccctataagacagatggtgcggatgctggtagctatcttaataagacggcgggtggtgtttttaaatcttatgctgtcgctttatggtttatgattaagaatgataaggctggactaaaaacgcttgatattgagcctgtcttctcaatgtctaaaattaatcagctttttgagcgtgcagaacccgaacatcttctttcattcatgaatgatattcgttcagaattaagggggaaagacaaaacgcttgctgatattggtgtagctggccttaaggcattcattgagatggaggataaaacaaaagcacaactcaaaagcaactttcttaatggattatcaccgtttgctaaccccaatgtggcaaatgctactgatggaaatgattttgatttgcggcaggtgcggaaaaagcggatgacaatttatttctgtatttctggtgataatgccaggttggctgaaaaaataacaaatattttctttcagcttgctatacaggtgaatcttgaaaagatgccaacggatgatccggaaataaagcatgactgcctttttctactggatgaattcccgtcaattggtgctgtagattacatcaagagtaaatctggtctcattgctggttacaagctgaaattgttgattgtttaccaggtcggctctcagcttgaggaaatctacagttatgcaggcagtaaaacattactggcaagtgcaccctgcaaaattgtttattccgcttctgatgttaaagatgcgcgggagttatcagaagcgatggggacacgaacagtaactatcggttcgaaaagcaaaagtcgtagtcgtggaggaacatcgagatctgaatcagaaagccttattgagcgtccactggtaacaacaaatgaactacttacactgaaatttagtgaagaaatcctggcaatgaagggagaaaacccgattcgttgtgaaaaggcattctactatctcaatgagtatttctttggtgactttgtgaaggttgctccggaacttgcaaacattttccccaggaagaaaggaaagctggttatgcctccacagaaagtatttgaaaatgaaatcgtcgcaaaagggtatctggcagtaaaagatgttcctgatctcgataaagcggcataaaggagaacatgatgaagaagttagtgtttttattgatttccattcttgctggttgttcatcaccgccagagccaacacccgtgcagtttgaaaaggcaaatgaagtgatcaatccctcattgccatatgtccccgattttcacggtgtcataaagtcagacgttagcggtaaaggatgggtttatgagatcacttccttatccggagtacaggccagaacgccgacgttttattacgctctggctcatgcggacaggattgtagtgacaacacatgatgctgggctgtggtttcgaatcagagatctgttgaagatggaaggggcaacagcagtcgtggaatggcgaaacgagaaaagttttttacctgaacagggaaaaatagttttcattaaagcacaaaacgaggtgaaaaatgactggaaaaaatagagtggttttaccagccttgctggcgttaggattaatatcaacaaatgctaatgcatctgacccttgcgcttcggtactttgcttatatggaaaagcagtcgggcaaggtggagggagtgaatgcagaagtgctgaaaaggatttttttaatattctgaaaaagaaaaaaggaagcattcgctggagtaaaacttttgatgcccgtaaagcatttctgaatcagtgttcaacggctgatcctgctgctatatcaaaaatcatgagtaagttcggcaaggttaaagggtagatgatatggaaaagcaaactactgatttactgaatgtaatcaagacaggacactctggctcaatagctggtaatcctgctcatgcactggatgataagactatgaacgccatcattcataactacgtggcaacgattgtgctcggtaaagcaggtaactgcaaagaaactcctctcacaaagtattgttcgaggactatgccagagcgtatttcagttgaagaaattaatgagtttaaaatttatccagagttattctgaacggagataacggcaaacgccgcagattccggattttaatccgggatttgcggggttgaacaaccgaagggcgttagtttcctcgtaatccatgaggtgtatatgaaagcaagaagtgtgagagttgccggaattgaaattatcgatagtgttaaaacggtcgcttttgtttttactgaaaccttactgtttatggtctggttttcggcaattgtctatgggctttatcgtgttgttatcgttttatgggatgatcctttaaagccgcaatcgctcatggaatttcttaatttcatagttgagttgtatagctatgtacttccttcgttggctgttatcgcagtggctttaatcgccgttttatccatttgtaaaatactctcagcaatatgggagggaagaaagcaatgagacattttcttaaggctctttcctttgttgtttccctgttaccagctacattgtgtgcggctgaaatccaggggaaagttattcgcgttctcgatggcgacaccatagaaattaaaacactacggtcatcgggcattatctgaacataaaacactatcagtaagttggagtcattaccaccgcccacaacatgccgccggaacgtcggtgctgacactggaaaatctgactggcgaaggtttcaggaatgtcagcctgacgctcaatgccggagaaattctgggcctggctgggctggtgggagccggacgcacagaactggccgagacgctctatggtctgcgtactttgcgtggcggaagcattatgctgaatggtaaagagatcaatagattatccaccggagaacgtttactgcgcggtctggtttatctgccggaagatcgccagtcatccggactgaatctcgatgcttcactggcgtggaacgtctgcgcccttactcataaccttcgtggattctgggcgaaaaccgcgaaagataatgccaccctggaacgatatcgtcgggcgctgaatattaaatttaaccaaccggaacaagctgcacggacattatccggtggcaaccagcaaaaaatcctcattgccaaatgcctggaagcttcgccgcaagcattgattgtcgatgagccgacgcgcggcgtggatgtctcagcccgtaatgatatctaccagctgttgcgcagcatcgccgcacagaatgtggcagtgctgcttatctcctctgatctggaagagatcgaactgatggcagatcgtgtgtatgtgatgcatcagggcgaaattacccactctgcactgaccgggcgcgatattaatgtcgagactattatgcgcgttgccttcggcgatagtcagcgtcaggaggcgtcatgctgaagtttattcagaacaaccgtgaaatcacggcactgctggcggtggtgctgctgtttgtattacccggttttctcgaccgccagtatttaagtgtgcaaacgctgaccatggtttatagcagcgcgcaaatcctgatcctgctggcaatgggcgcgacgctggtaatgcttacgcgcaatattgatgtttcagtgggttcgattaccggaatgtgcgcggtgctgttggggatgttactgaacgcaggatattcactacctgttgcctgtgtcgcgactttactgcttggtttgctcgcgggatttttcaacggtgtcctggtcgcgtggctaaagatccctgccattgttgccacccttggctcgttagggttgtacagaggcatcatgttgctgtggactggcggtaaatggattgaggggttacccgccgaactgaaacagctctccgccccgctgctgcttggcgtttcagcaattggttggttaacgataattctggtggcatttatggcctggctgctggcaaagacggcgtttggacgcagttttaatgccacgggcgataatttacagggagctcgtcaactgggcgttcgtacggaagccattcgcattgtggcattttcgttgaacggctgcatggcggcactggcggggattgtgtttgcttcgcagattggttttatccccaaccagaccggtaccgggctggagatgaaagcaattgcagcctgcgtgctgggcggcattagtttgctcggcggttccggtgcgatcatcggtgcggtactcggcgcatggttcctgacgcagatcgatagcgtactggtgctgttgcgcattccggcatggtggaacgattttatcgcgggcctcgtgctgctagcggtgctggtgtttgatggacgcctgcgttgtgcgctggaacgtaatctgcggcggcaaaaatatgcccgctttatgacgccaccgccatccgttaaacccgcttcgtcaggtaaaaaacgggaggccgcataatgcgtattcgctacggttgggaactggctcttgccgcactgctcgttattgagattgtcgcatttggtgcaattaacccgcggatgttagatctcaatatgttgctgttcagcaccagtgactttatctgcattggcattgtcgccctaccgctgacgatggtgattgtcagtggcgggatcgatatttcgtttggttcgaccatcggcctctgcgccattgcattgggcgtactgtttcaaagtggtgtgccgatgccgctggcgatactcctgaccttactgctcggcgtattgtgcgggctgatcaacgccggattaattatctataccaaagttaacccgctggtgattacgcttggcacgctgtatctgtttgccggaagtgccctgctgctttccgggatggccggagcgacggggtacgaaggtattggtggattcccgatggcgtttacagatttcgctaacctggatgtgctggggctccccgttccgctgattatcttcctgatatgtctcctcgttttctggctctggctgcataaaacccatgccggacgtaatgtgtttttgattgggcaaagcccgcgcgtggcgctttatagcgcgattccagttaaccgcaccttatgtgcgctctatgccatgacggggctggcgtctgcggtcgccgctgtgctgctggtatcgtattttggttcagcacgttccgatctcggtgcgtcgtttctgatgcccgccatcaccgccgtggtgcttggcggtgccaatatttatggtggttccggttccattatcggcaccgccattgcggttttattagtgggatatttgcaacaaggtttgcaaatggcaggagtgccaaatcaggtgtccagcgccctttccggtgcgctacttatcgtcgttgtcgtaggtcgttccgttagcctgcatcgccagcaaattaaagagtggctggcgcgtcgggccaataacccattgccataaaggatatcttcatgacacttcatcgctttaagaaaatcgccttacttagcgttcttggcattgccgcaatctctatgaatgtgcaggccgcagagcgtattgcatttattccaaaactggttggcgtgggattttttaccagcggtggcaacggcgcacaacaagcgggtaaagagctgggcgttgatgtgacctacgacgggccgacagaacccagtgtttctggtcaggtacagttgattaataacttcgtcaatcaaggttataacgccattatcgtttctgcggtttcgcctgatggcttgtgtccggcactgaaacgcgccatgcaacgtggtgtgagagtgctgacctgggactctgatactaaaccggagtgccgctcttactacattaatcagggaacgcccgcccagttgggaggtatgttggtggatatggctgcgcgtcaggtgaataaagacaaagccaaagtcgcgtttttctactcaagccccaccgttacggaccaaaaccagtgggtgaaagaagcgaaagcgaaaatcgccaaagagcatccaggctgggaaattgtcactacgcagtttggctataacgatgccactaaatcgttacaaaccgcagaaggaatattaaaagcgtatagcgatctcgacgccattatcgcccccgatgccaacgccctgcccgctgccgcacaagccgcagaaaacctgaaaaatgacaaagttgcgattgtcggattcagtacgccaaacgtgatgcgtccatatgtggaacgcggcacggtgaaagaatttggcctgtgggatgtggttcagcaaggcaaaatttcagtgtatgtcgcggatgcattattgaaaaaaggatcaatgaaaacgggcgacaagctggatatccagggcgtaggtcaggttgaagtctcgccaaacagcgttcagggctatgactacgaagcggatggtaatggcatcgtactgttaccggagcgcgtgatattcaacaaagagaatatcggcaaatacgatttctgatgtgcattacttaaccggagtaagttatggcagatttagacgatattaaagatggtaaagattttcgtaccgatcaaccgcaacaaaatatcccttttaccctgaaaggttgcggtgcgctggattggggaatgcagtcacgcttatcgcggatatttaatccgaaaacgggtaaaaccgtgatgctggcctttgatcatggttattttcaggggccgactaccggacttgaacgcattgatataaatatcgccccgctgtttgaacatgccgatgtattaatgtgtacgcgcggcattttgcgcagcgtagttcccccggcgaccaataagccggtggtactgcgggcgtcaggtgcgaactctattctggcggaattaagtaatgaagccgtggcgttatcgatggatgatgccgtgcgcctgaacagttgcgcggtggcggcgcaggtttatatcggcagcgaatatgaacatcagtcgatcaaaaatattattcagctggtcgatgccggaatgaaagtgggaatgccgaccatggccgtgactggcgtgggcaaagatatggtgcgcgatcagcgttatttctcgctcgcgactcgaatcgccgctgaaatgggggcgcaaattatcaaaacctattatgtcgaaaaaggttttgaacggattgttgccggatgtccggtacccattgttattgctggcggtaaaaaattaccggagcgcgaggcgctggaaatgtgctggcaggctatcgatcagggcgcttctggtgtggatatggggcgtaatattttccagtctgaccatccggtggcgatgatgaaagccgtacaggcggtggttcaccataacgaaacggctgatcgggcatatgaactctatctgagtgaaaaacagtaactgcggatttaaggagaagaattatgcacgtcacactggttgaaattaacgttcatgaagacaaggttgacgagtttatcgaagtttttcgccagaaccacctgggctctgtacaggaagaaggcaatttgcgcttcgatgtcttacaggacccggaagtgaattcgcgcttttatatctacgaagcctataaagatgaagacgcagtggcgttccataaaaccacgccccactacaaaacctgtgtcgcgaaactggaatctttaatgaccgggccgcgtaaaaaacgtctgttcaatggtttgatgccgtgaggcgaatttatcaattttatctacaattggggtaacgcgctgacgggagtaaaaaaatgtctgactggaacccctctttatatttgcacttttccgctgaacgatcgcgtccggcggtggagctgcttgccagagtgccgctggaaaatgtcgaatatgttgccgatcttggctgtggcccaggtaacagcaccgcccttctacaacaacgttggcctgcggccaggataacaggcatcgactcgtctccggcgatgattgctgaagcgcgcagtgctttgccagactgccagttcgtggaagcagacatccgcaactggcaaccggtacaggcactcgatctgatttttgctaatgcctcactgcaatggctgcccgaccactacgaattgtttcctcatctggtttctttacttaatccgcagggcgtgctggcagtacagatgccagataactggctggagccgacccatgtgctcatgcgcgaagttgcctgggaacaaaactacccggatcgcgggcgtgagccgttggctggcgttcatgcttactacgatattttgagcgaagccggatgtgaggtcgatatctggcgaaccacctactatcaccagatgccgtcacaccaggcgattatcgattgggtgactgccactggattacgtccgtggttacaggatctgaccgagagcgaacagcagctttttcttaagcgctaccatcagatgctggaagagcagtatccactgcaagagaacggacagatactgctggcatttccgcgtctgtttattgttgcccggcgtatggagtaaatatcacgtcagctggtaatgacgatcgggaagaatttttgctggaatttcggcttcatcgttcatctgtaacaggtcaatttcaatagcgttgcagatggcatccagtggtaaatcattgttttcagtaccgaacggatcttccagttcttccgccagacaatccagcgaaataaaagtgtaggaaatcagcacagagataaaaggcgtcatgtaatgcaggtccacgaccagcgcgaacggcagcatgatacaaaacagataaacggtacgatgcaaaatcagggtgtaggcaaagggaattggcgtataggcaatgcgctcgcatcctgccaggaccgctgaaatatcattaagccgatcgttgaggctaataaacaggatatctgaaagctgtccattgcggcgctgaaccgccaaccattctcccattattaacaagatacggttagctggagagttcgaagccagtacacgctgaagatctttagtcttgagataatgagccagcacttccgcctgtggctgtttgcgtaatgtcatgcgtaaacagtgggcgaaagcgatttgcagccgggcaaactcccttacacttgccgaatccggcaatgtcgtttttacctcgcgcagtaacgaccgtgaggcaatcatcaactgcccccaaagttttcgcgcttcaacgtaacgggcgtacccggcattattacgaaaaccaagaaaaatggcgatggcgacaccgagaatgctgaacggtgcgagggtgaatttgatgcccagatgcgtgtaccagggcagcatgaaaataacagcgatagaaaagagaaaattgagtagtaagcgcgaggatatcttggataatactgagccgtgccagacaaaaatacggcgcagccagtgttgttgtggacgaacaatcatggttatcttcaggcgtggaaaagtcgccctattaaacgtgattacgatcacattctcaagacgctacttacaaattacctacaagcttacaacattagcaggcgctgcatgtggcacctgttaatgataaaggcatataggatgttgtaactaatatggtgaaataagaaacccggtcgaaaccgggttcagaagtaacggtgttattagcacaacggacgtacagcttcgcgcatccctttttcgagaatcgcatccaggtcattagcaacctgctcgaccagaccaggcacttgcgtcaggtcctgctcccagtggtctttttctgccaaaacaatcgctaccagttcctgggtgccgataacacggtcacgatgctggctccagagttgctgataacgttccagccagtgtgcatcgtcctgtaccggatatgtttcgccgttacgctcaccacgatagaacgcaatcaatgccgctaatgcgaaagtaaggcgcgccggaagtgtgccgtttgccttctgccctgccagcagctgtggcaggatgcgggtgcggaacttggtcataccgttgagcgcgatagacagcagctgatgcttaatgtacgggttacggaaacgcccggtgactgcactggcgaaagattccagttcatcacgaggcaaatccagtaccggaataatttcttcgtagatagctttttcaacgaatgcgcaaatttcagcatcgttcatcgcttcacctacggtatccagccctgcctggaacgccaccggcaccagcgcggtgtgcgcaccgttgaggattgccactttgcgttctttgtacggtttaatatcgtcaacaatcagcacgttgagcggatatttgtccagacgcagttcagtcgctaaggatttcggtccctgaatcacaaacaggtaaaagtgttcagcggtgtcgagaaaaccatcgtgataacccagttcttcttccagtttagccacttcatcgcgcggataaccggtaacgatacggtccaccagcgtagaacagaagctgttagcctgatccagccattgaataaatgcttctggcagtgcccactcttgcgcatagcgcagcaccagttcacgcaacgcgtcgccattgtagtcaatcaactcacacggaatgatgatccaacctttatccagcgcaccgttgaaatggctaaagcgttcgaacagcagacgggtcagttttgccggatagcttaccgctggcgcgtcatcgaatttatcgcccgcatggtagctgatacccgcttcggtggtgttagagaaaacaaagcgcatttccgggttgtgcgccagtttcaggaattcatcgtattcactgtagacgctgatttcacgattaaccgagcgaatcagacgcgcgtcgctgaccgcttcccccttctcattcaggccacggataatggtggtgtacagaccatcctgcgtgctcagtgacggcgggaatgaagtttcaatcggacgaacaacgaccacaccagaattcagatcggtgtgctcattcaggagatcgatttgccagtcaacaaaggcgcgcaggaagttaccttcaccaaactgaatgatacgttctggatactgtgcaccgggaaaatcgcgacgatttagtgttttcacaatgggttcccttctgattagtcatacaacctgcttgaattggtacgacaggttagcaaactttaatacgccgaacccctgttttgatcaactcctgatgattaatgagcagttttatgagaaaagtgtggcgcggatcatggtttaatcgaggaaatacgccttttcctggatcataaagtggtagaacacattgcattcaaatcgcgcggaatgaataaagatgtcagacaacttcctcaccgtaacgcatagtgctggtacggttgcgcccatctttcttcgagcgatacagacacgtatcggcttcgaccatcaatttattaaagtcatcggtcagcgttcggtacgatgcgcgaccactaccgacgccaatacttaccgtgagataaagcgttttttgttgccaggtgaatggttgcagttcaacgcctttacggattttttccgccattagcagaccatcgacaggattcaccgacggcactgcaacagcaaattcttcgccgcccattcgcgccaccagccccttatcaccgacaatcttctgaatatgccgggcaaacacgcttaacactttatcgccacattcatgtccatagttatcgttaatgcttttgaaatagtcgatatcaagcagcatgacagtcagatgttgtgtctgtttcagcgatagacttttcagcgcctcataaagaccggaccgtgagtaaacctgagtcagaaaatcaaagtcggctcgcagcgcaacttgcttcattagcgaattgatcgctgccacgctaaaagaaaccataattgggcatatcgccatcgtggcaataccgagacgtgcggagaacatttccggaatggagaacggcgaaccgaccgagatatcaatcaccgaatttgccaccagtacgatttccaccgcaccggtgacaaaggtcaacagacatgttacctgcggcgtatagcgcactgcacaccagattaatgcaggcagcgggaacgccagactccccgctccaccaatgactaccgaggcaataaccgacacaataagcgcgatggcgggcatcatctgttctgctttaaagcgcggcagcactccaggaatagccaacgtcagcatacaaggcacgatcaacacgcccgttgagaattgctcactgaaccagtcggcaagcaaaggccagaaatccagactatcaatactgaccgaaccaatcgccccgacaatagcgcataataatgcggcaatcagacagtaattaaatagccgtaaggcacttactggctcatacttatttttccccagacgcttatcccgcacgaccagtaaggcgacggtaacaataaacatcatattggagaaattgatagccagtgaaaccagtccccattcggtggttatggcatcataaaccagcatcgccacataactgatcgcatagtaatgcagtcgattaagccagacatagcgggcaaacacccccgccattacgccattcagcggccagaaaagagaaagttcgtgaaccagccgtaactctgcaccaataaaatagaacagcgtggttagcgcaaaaatagcgatgatattacgtagcagatgaccttcctggaacaaacggaaagttgaaatggggtgtacatgcattaattatctgtccatacaattgcgggtggcaattatctcaacgtaataagtaaattctcataaaggatagcgtgttcgctaacagcggcggcaaataaaggtaccctgggaatgctattttatcgttttccgcaattctcatggctgattcatctgtacaaccagccagtgatagattaccgccacgatataacgttgttgttcttcgcttaacgaaacaccctgcggaatgttatgccacttagccagacaaccgcgacagcaggtcgcggtggcgtgctgagcgataaacaccggatgcccgcgcatgggggtttgcttaccgtcattagccggtaatgccggagcaagacgtttagcgacaaaatccgccgcatgttgttcgatgactggcgcgcctttctccaggcaatactgacgctctttcatgcccagacgaaagcgagagcgaaattttgaacgggataaacgcgcgaagagtggatcgagagactgcattaataaaccgaacgccctaactgtttcgtcaattgttcaaggacggcaatacccgcaagcgagttacctgcatcatccagttccggactccagacagcgatggccatttcatgcggaacaatcgccacaataccgccaccaacgccagatttcgccggtagccccacccgccaggcaaactcccccgcgttctggtacataccactggtcgccatcagcgcgttaatttgccgcgcctgcattggcgtcaccactggttcatcaatatgaatagctttcccctgattagccagaaagacaaacgtccgggccagctctacacagctcattttcagagcgcagtaatgaaagtagttttgcagaacggttgtcacgtcatgatggaaattgccaaacgacttcatcagccaggcgatagccgcatttcgcgcggaatgttcaaattcggaacgcgctaccaccgtatcgtaggaaatatcagacacaccgcttaagccgcgcacgacttccagcatacgttgccgtggtgcgcttaatcgcccttgcaacatatcgcagaccaccagcgcaccggcattaatgaacggattacgcggtataccctgctccatttccagttgcactaaggaattgaacggtgatccagacggatctttgccgacgcgttgccagatttcctcttcggagtaatgacgcatggcgacaacgagactcagcactttggaaatagactgaatggaaaaacgttcttgcgcgtctccggcctgaaaaagctgtccgtcaacggtacagatagcaatccccaatcgggaaccgtctactgtagccagcgccggaatataatccgcgactttaccctgaccaatgagcggccgcacttgccgcaagatgttttctaaaattgcattatccatggcgactgccactttctactcctggaccgcaggtctgaaaagacctgcgagtatatcagagctgaatatgtcgcgtcagatccggtctttccacaccgtctggatattacagaattcgtgtaagccgaaatgggaaagctcacgaccaaagccactctttttcacgccaccaaaggccactcgcgcgtcgctggcacaataaccattgataaacaccccaccgcattccagacgtgccgccatctgtctggcctgtgtttcgtcagtggtaaaaatggtcgctgaaaggccgaactcactatcattagccagttccagtgcatgttctgcatctttcgcaatggtgattgccgcaacggggccaaacatttcttcccgaaacgcggtcatttctggggtaacattcgccagaaccgttggcggatagtagttacctgccccagccatcttttccccgcccagtaacaaacgcgcaccctgcgccagggttttctccacctgatgatgcagctcatcacgtaaatcaaaacgagccattggtccgagagcgttctcttcgtcacggggatcgcccattttcaaggctgccgcagctgccacaaaacgttcggtaaatgccgaagcaattccctcttcgataataaagcgttttgccgctgcacatacctgtccggtattctgataacgtccggctaccgccgctttcaccgccagttccagatcggcatcgttaagcacaataaacggatccgaaccgcccagttccagtacgcattttttcagtgccgctccagcctgtgcgccaatagccgctcccgcacgaacacttccggtcaccgtgacagcagcaatgcgcgagtctttaatcatctgactgacaccgtcgttgtcggcattcagccagccatatacgccttgtgggatacccgcatctttaaacacctgggcaatgagctgtgcacagcccatcacattcggcgcatgtttaagtaagtagccgttacctgcaagaatgatgggaacagcgccacgcatcacctgccataacggaaaattccacggcataatcgccagaatcgtccccaacggtcgatactcaataaccgcctgctgattttccaccagcgtaggttccgccttcagcattgccggaccatgttctgcataccagtcacacaaattcgccgatttcgccacttcagcgcgcgcctggttgattggtttgcccatttcgcgggtgatcatttgcgccatttcttcgctacgagcgcgcagagccttaccgatatcacgcagtttttcagcacgataatctatatttgtctcgcgccagtcgcgaaagcctgctgccgccagctgaagtgcgttttcgatatcgtcagcgccagcccacggcagcacagaaagttgttcacccgtggcaggatttatcgaaattgcatgagttgccggagtaatggtcatcggggtatctcctttatgagtcatggtatgaagatacgcagatttactcttgctttaaaatgaataatattaagccacttattcacgaatcgagaatgctatggatctgacccaactggagatgttcaacgcggttgccgaagctggcagcataacccaggctgcagcaaaagtgcatcgcgtgccgtcgaatctcactacccgtctgcgccagctggaaacagaactgggggttgatctgtttattcgcgagaatcagcgtttacgtctctctcctgccgggcataactttttacgctatagccaacaaattctcgcgttagtggatgaagcgcggagcgttgtcgctggcgatgagccgcaaggtttattttctcttggttcgctggaaagcaccgctgcagtgcgcattccagccacgctggcggaattcaaccgtcgttatcccaaaattcagttttcactttccaccggcccttccggcactatgctggatggtgtactggagggaaaactgaatgcggcgtttattgatggacccattaaccatactgccatcgacgggataccggtataccgcgaggaactgatgatcgtcacgccacaaggatatgcgccagtaacccgtgccagtcaggttaatggcagtaacatttatgccttccgcgccaattgttcgtatcgtcgccacttcgagagctggtttcatgctgacggtgccgctccgggaactatccatgagatggagtcttatcacggaatgttggcctgtgtgatcgcaggagcaggcattgcgcttattccgcgctctatgctggaaagtatgccggggcatcaccaggttgaagcgtggccgttagctgagcaatggcgttggttaacaacctggctggtctggcgtcgtggtgcgaaaacacgtccgctcgaggcatttattcaactgctggatgtgcctgactcggcaagacagggatatcaatgagctatttttgatagttcttgcggttaatatgctctatatagtgatgttccgatgacttatgactatatggggcaaatatggttacgccagtaagcatcagcaattacatatctcttcctgatgattttcccgtacgtaatattgcaccgcaggtaaaagaagttttaaaggattttattgatgcacttagtacaataatatgtaatgaagagtggcgcacgtctttaaacatcaactcagccacaaaaaagatatttaataaccttgacaacttatcatatattcagaggacttcttttcggggtaacgacacgctatacaatgaaaaggttcagtttaaactcacttatcccgccaggaatggaagacacaaagaaaatattgaatttcaggtagtaataaatttaagccctatttatttagataattttcgccatgatggagaaattaatattttttgcgctcccaacccaaagcctgtcactatggggcgcgtatttcagaccggcgtcgagcgtgtactctttctgtttctgaatgattttattgaacaatttccaatgatcaaccctggtgttcccatcaaaagagcgcatacaccacatattgaacccctgccttcggatcaccataccgctgcagattacttacgccagtttgatttgcttgtcctgaattttatctctcgcggtaattttgtcatactcccccgattatggaataactctgaggttcacagatggttcgtcaataaagatcctaacttgatcaccgccattctcgacataacggacagcgaattaaaagaggatttgttgcaaagcctgatggattcattaggttctaacaaacatgtactacccgaagtctgcatctgctttttatcccttttagcagaacaagaatctcctcattttcagaacttgtttttatttttcgccaatatgttattgcactatcaccaatttatgaatcccaatgaaagtgatttgaatgacgtgttgatgccagcatcattaagtgatgataaaattatcaaacatatggcgcgcaggaccctcaaactgtttgtaaaaaatgaaacaccgccaaaagttactcacgaagacctggtgaaaaacaggcctcgctcccctgtcagaccacctatacccgcaacctccaaaacgccagacctccctgaacgtcattaaaccgtgatgttaccgactctctgacgcgtgaaagaatcagcgtcagagaaacggaaaacgcgatccagatcacaaatgcattgtattcacatcattaaccgttttaagatcatttcatcactttttcgcaactcacccgataatctgttatgacaacaaacactgtttcccgcaaagtggcgtggctacgggtcgttacgctggcagtcgccgccttcatcttcaacaccaccgaatttgtccctgttggcctgctctctgacattgcgcaaagttttcacatgcaaaccgctcaggtcggcatcatgttgaccatttacgcatgggtagtagcgctaatgtcattgccttttatgttaatgaccagtcaggttgaacggcgcaaattactgatctgcctgtttgtggtgtttattgccagccacgtactgtcgtttttgtcgtggagctttaccgttctggtgatcagtcgcattggtgtggcttttgcacatgcgattttctggtcgattacggcgtctctggcgatccgtatggctccggccgggaagcgagcacaggcattgagtttaattgccaccggtacagcactggcgatggtcttaggtttacctctcgggcgcattgtgggccagtatttcggttggcgaatgaccttcttcgcgattggtattggggcgcttatcacccttttgtgcctgattaagttacttcccttactgcccagtgagcattccggttcactgaaaagcctcccgctattgttccgccgcccggcattgatgagcatttatttgttaactgtggtggttgtcaccgcccattacacggcatacagctatatcgagccttttgtacaaaacattgcgggattcagcgccaactttgccacggcattactgttattactcggtggtgcgggcattattggcagcgtgattttcggtaaactgggtaatcagtatgcgtctgcgttggtgagtacggcgattgcgctgttgctggtgtgcctggcattgctgttacctgcggcgaacagtgaaatacacctcggggtgctgagtattttctgggggatcgcgatgatgatcatcgggcttggtatgcaggttaaagtgctggcgctggcaccagatgctaccgacgtcgcgatggcgctattctccggcatatttaatattggaatcggggcgggtgcgttggtaggtaatcaggtgagtttgcactggtcaatgtcgatgattggttatgtgggcgcggtgcctgcttttgccgcgttaatttggtcaatcattatatttcgccgctggccagtgacactcgaagaacagacgcaatagttgaaaggcccattcgggccttttttaatggtacgttttaatgatttccaggatgccgttaataataaactgcacacccatacataccagcaggaatcccatcagacgggagatcgcttcaatgccacccttgcccaccagccgcataattgcgccggagctgcgtaggcttccccacaaaataaccgccaccaggaaaaagatcagcggcggcgcaaccatcagtacccaatcagcgaaggttgaactctgacgcactgtggacgccgagctaataatcatcgctatggttcccggaccggcagtacttggcattgccagcggcacaaaggcaatattggcactgggttcatcttccagctcttccgacttgcttttcgcctccggtgaatcaatcgctttctgttgcggaaagagcatccgaaaaccgataaacgcgacgattaagccgcctgcaattcgcagaccgggaatcgaaatgccaaatgtatccatcaccagttgcccggcgtaatacgccaccatcatgatggcaaatacgtacaccgaggccatcaacgactgacgattacgttcggcactgttcatgttgcctgccaggccaagaaataacgcgacagttgttaatgggttagctaacggcagcaacaccaccagccccaggccaattgctttaaacaaatctaacattggtggttgttatcctgtgtatctgggttatcagcgaaaagtataaggggtaaacaaggataaagtgtcactctttagctagccttgcatcgcattgaacaaaacttgaaccgatttagcaaaacgtggcatcggtcaattcattcatttgacttatacttgcctgggcaatattatcccctgcaactaattacttgccagggcaactaatgtgaaaagtaccagcgatctgttcaatgaaattattccattgggtcgcttaatccatatggttaatcagaagaaagatcgcctgcttaacgagtatctgtctccgctggatattaccgcggcacagtttaaggtgctctgctctatccgctgcgcggcgtgtattactccggttgaactgaaaaaggtattgtcggtcgacctgggagcactgacccgtatgctggatcgcctggtctgtaaaggctgggtggaaaggttgccgaacccgaatgacaagcgcggcgtactggtaaaacttaccaccggcggcgcggcaatatgtgaacaatgccatcaattagttggccaggacctgcaccaagaattaacaaaaaacctgacggcggacgaagtggcaacacttgagtatttgcttaagaaagtcctgccgtaaacaaaaaagaggtatgacgatgtccagacgcaatactgacgctattaccattcatagcattttggactggatcgaggacaacctggaatcgccactgtcactggagaaagtgtcagagcgttcgggttactccaaatggcacctgcaacggatgtttaaaaaagaaaccggtcattcattaggccaatacatccgcagccgtaagatgacggaaatcgcgcaaaagctgaaggaaagtaacgagccgatactctatctggcagaacgatatggcttcgagtcgcaacaaactctgacccgaaccttcaaaaattactttgatgttccgccgcataaataccggatgaccaatatgcagggcgaatcgcgctttttacatccattaaatcattacaacagctagttgaaaacgtgacaacgtcactgaggcaatcatgaaaccactttcatccgcaatagcagctgcgcttattctcttttccgcgcagggcgttgcggaacaaaccacgcagccagttgttacttcttgtgccaatgtcgtggttgttcccccatcgcaggaacacccaccgtttgatttaaatcacatgggtactggcagtgataagtcggatgcgctcggcgtgccctattataatcaacacgctatgtagtttgttctggccccgacatctcggggcttattaacttcccacctttaccgctttacgccaccgcaagccaaatacattgatatacagcccggtcataatgagcaccgcacctaaaaattgcagacccgttaagcgttcatccaacaatagtgccgcacttgccagtccgactacgggcaccagtaacgataacggtgcaacccgccaggtttcatagcgtcccagtaacgtcccccagatcccataaccaacaattgtcgccacaaacgccagatacatcagcgacaagatggtggtcatatcaatagtaaccagactgtgaatcatggatgcggaaccatcaagaatcagcgaggcaacaaagaagggaatgattgggattaaagcgctccagattaccagcgacatcaccgccggacgcgttgagtgcgacatgatctttttattgaagatgttgccacacgcccaactaaatgctgcagccagggtcaacataaagccgagcatcgccacatgctgaccgttcagactatcttcgattaacaccagtacgccaaaaatcgctaaggcgatccccgccaattgtttgccatgcagtcgctccccgaaagtaaacgcgccaagcacgatagtaaaaaacgcctgtgcctgtaacaccagcgaagccagtccagcaggcataccaaagttaatggcgcagaacagaaaggcaaactgcgcaaaactgatggttaatccataccccaagagcaaattcagtggtactttcggtcgtgcaacaaaaaagatggccggaaaagcgaccagcataaagcgcaaaccggccagcatcagcggtggcatgttatgaagccccactttgatgaccacaaaatttagcccccatacgaccactaccagtagcgccaacacaccatcttttcgcgacattctaccgcctctgaatttcatcttttgtaagcaatcaacttagctgaatttacttttctttaacagttgattcgttagtcgccggttacgacggcattaatgcgcaaataagtcgctatacttcggatttttgccatgctatttctttacatctctaaaacaaaacataacgaaacgcactgccggacagacaaatgaacttatccctacgacgctctaccagcgcccttcttgcctcgtcgttgttattaaccatcggacgcggcgctacgctgccatttatgaccatttacttgagtcgccagtacagcctgagtgtcgatctaatcggttatgcgatgacaattgcgctcactattggcgtcgtttttagcctcggttttggtatcctggcggataagttcgacaagaaacgctatatgttactggcaattaccgccttcgccagcggttttattgccattcctttagtgaataacgtgacgctggttgtgctcttttttgccctcattaactgcgcctattctgtttttgctaccgtgctgaaagcctggtttgccgacaatctttcgtccaccagcaaaacgaaaatcttctcaatcaactacaccatgctaaacattggctggaccatcggtccgccgctcggcacgctgttggtgatgcagagcatcaatctgcccttctggctggcagctatctgttccgcgtttcccatgcttttcattcaaatttgggtaaagcgcagcgagaaaatcatcgccacggaaacaggcagtgtctggtcgccgaaagttttattacaagataaagcactgttgtggtttacctgctctggttttctggcttcttttgtaagcggcgcatttgcttcatgcatttcacaatatgtgatggtgattgctgatggggattttgccgaaaaggtggtcgcggttgttcttccggtgaatgctgccatggtggttacgttgcaatattccgtgggccgccgacttaacccggctaacatccgcgcgctgatgacagcaggcaccctctgtttcgtcatcggtctggtcggttttattttttccggcaacagcctgctattgtggggtatgtcagctgcggtatttactgtcggtgaaatcatttatgcgccgggcgagtatatgttgattgaccatattgcgccgccagaaatgaaagccagctatttttccgcccagtctttaggctggcttggtgccgcgattaacccattagtgagtggcgtagtgctaaccagcctgccgccttcctcgctgtttgtcatcttagcgttggtgatcattgctgcgtgggtgctgatgttaaaagggattcgagcaagaccgtgggggcagcccgcgctttgttgatttaagtcgaacacaataaagatttaattcagccttcgtttaggttacctctgctaatatctttctcattgagatgaaaattaaggtaagcgaggaaacacaccacaccataaacggaggcaaataatgctgggtaatatgaatgtttttatggccgtactgggaataattttattttctggttttctggccgcgtatttcagccacaaatgggatgactaatgaacggagataatccctcacctaaccggccccttgttacagttgtgtacaaggggcctgatttttatgacggcgaaaaaaaaccgccagtaaaccggcggtgaatgcttgcatggatagatttgtgttttgcttttacgctaacaggcattttcctgcactgataacgaatcgttgacacagtagcatcagttttctcaatgaatgttaaacggagcttaaactcggttaatcacattttgttcgtcaataaacatgcagcgatttcttccggtttgcttaccctcatacattgcccggtccgctcttccaatgaccacatccagaggctcttcaggaaatgcgcgactcacacctgctgtcacggtaatgttgatatgcccttcagaatgtgtgatggcatggttatcgactaactggcaaattctgacacctgcacgacatgcttcttcatcattagccgctttgacaataatgataaattcttcgcccccgtagcgataaaccgtttcgtaatcacgcgtccaactggctaagtaagttgccagggtgcgtaatactacatcgccgattaaatgcccgtaggtatcattaaccaatttaaatcggtcaatatccaacaacattaaataaagattcagaggctcagcgttgcgtaactgatgatcaaaggattcatcaagaacccgacgacccggcaatcccgtcaaaacatccatattgctacggatcgtcagcaaataaattttgtaatcggttaatgccgcagtaaaagaaagcaacccctcctgaaaggcgtcgaaatgcgcgtcctgccagtgattttcaacaatagccagcattaattcccgaccacagttatgcatatgttgatgggcagaatccattagccgaacgtaaggtaattcatcgttatcgagtggccccagatgatcaatccaccgaccaaactggcacagtccataagaatggttatccgttatttctggcttactggcatctctcgcgaccacgctgtgaaacatactcaccagccactggtagtgggcatcgatagccttattgagatttaacaagatggcatcaatttccgttgtcttcttgatcattgccactcctttttcacagttccttgtgcgcgctattctaacgagagaaaagcaaaattacgtcaatattttcatagaaatccgaagttatgagtcatctctgagataacattgtgatttaaaacaaaatcagcggataaaaaagtgtttaattctgtaaattacctctgcattatcgtaaataaaaggatgacaaatagcataacccaataccctaatggcccagtagttcaggccatcaggctaatttatttttatttctgcaaatgagtgacccgaacgacggccggcgcgcttttcttatccagactgccactaatgttgatcatctggtccggctgaacttctcgtccatcaaagacggccgcaggaataacgacattaatttcaccgctcttatcgcgaaaaacgtaacggtcctctcctttgtgagaaatcaaattaccgcgtagtgaaaccgaagcgccatcgtgcatggtttttgcgaaatcaacggtcattttttttgcatcatcggttccgcgatagccatcttctattgcatgaggcggcggtggcgctgcatcctgttttaaaccgccctggtcatctgccaacgcataaggcatgacaagaaaacttgctaatacaatggcctgaaatttcatactaactccttaattgcgtttggtttgacttattaagtctggttgctatttttataattgccaaataagaatattgccaattgttataaggcatttaaaatcagccaactagctgtcaaatatacagagaatttaactcactaaagttaagaagattgaaaagtcttaaacatattttcagaataatcggatttatatgtttgaaaattattatattggacgagcatacagaaaaagcaaatcacctttacatataaaagcgtggacaaaaaacagtgaacattaatagagataaaattgtacaacttgtagataccgatactattgaaaacctgacatccgcgttgagtcaaagacttatcgcggatcaattacgcttaactaccgccgaatcatgcaccggcggtaagttggctagcgccctgtgtgcagctgaagatacacccaaattttacggtgcaggctttgttactttcaccgatcaggcaaagatgaaaatcctcagcgtaagccagcaatctcttgaacgatattctgcggtgagtgagaaagtggcagcagaaatggcaaccggtgccatagagcgtgcggatgctgatgtcagtattgccattaccggctacggcggaccggagggcggtgaagatggtacgccagcgggtaccgtctggtttgcgtggcatattaaaggccagaactacactgcggttatgcattttgctggcgactgcgaaacggtattagctttagcggtgaggtttgccctcgcccagctgctgcaattactgctataaccaggctggcctggcgatatctcaggccagccattggtggtgtttatatgttcaagccacgatgttgcagcatcggcataatcttaggtgccttaccgcgccattgtcgatacaggcgttccagatcttcgctgttacctctggaaaggatcgcctcgcgaaaacgcagcccattttcacgcgttaatccgccctgctcaacaaaccactgataaccatcatcggccaacatttgcgtccacagataagcgtaataacctgcagcatatccgccaccaaaaatatgggcgaaataactgctgcgatagcgtggcggtatagcaggaagatccatattttccgccaccagcgcccgcaattcaaaatcatcgacatcctgcattgcttcgttttcttccaggcaatgccagcgcatatcgagaagtgcggcgctaagcagttcgctcatctcataccctttgttgaacaggctggcattacgcattttctgttgcagttcgtcaggcattgctgccccgctctgataatgccgggcgtagcgagcgaatacctgcggatgcgttgcccagtgttcgttgatttgcgacggaaattcgacaaaatcacgcggcgtgttggtgccggaaagcgtggcataacgctggcgggcaaaaaggccgtgcagcgtatgaccaaattcatggaataaggttatgacatcatcccagagtaacaacgcaggctcaccggcagcgggtttctgataattgcagacgttataaattaccggatgtgttttattaagcgttgattgctcaacaaaattgcccatccatgcaccgccgctttttgaatcacgggcgaagaaatcaccgtaaaataacgccagccccacgccattatgatcaaaaatttcccacacacgaacgtcaggatggtagacaggaatatcaaaacgttcgacaaacttaataccgaagagctgattcgcggtccagaatacaccttcatttaacaccgtgtttaattcaaaatatggcttgagctgcgcctcatcaagatcaaatttctcccgccgtacctgttccgcataaaatgcccagtcccacggctgcgcgctaaacccgccctgctgcttatcgataaccgcctgtatggaggctaattcatcgctcgcacgttgacgcgccgctggaacaatttcccgcataaagttaagtgctgcttcaggtgtttttgccatctgatcggcgattttccatgcggcataatgaggaaaaccaagtagtgttgcctgttgtgcacggatctccaccagacgttgaatgatagcgcgggtatcattggcatcatttttttccgctcgcgtccagcccgcaataaacagtttttcacgcgtcgcacgatcgcgcatttcggcaagcgccggttgttgggtggtattcagcagcggaatcagccatttgttatccagacctttctcgcgagccgcctctgccgccagcgcaatctcttgctcactcattcctgccagctgcgcgatatcgttcacaaccagaccgccggatttatttgctgccagtaatcgctggttaaactggctggtcagggtcgcagcttctgtattcagtacttttaattttgctttatcagcttgcgcaagtttggctccggcaaggacaaaacgttgatgaatcacctccaccaggcggatggattcactatcaagccccagggattcacggcgctgccagacagcatctacccgcgcgaataattcaccgttcagatagatatcattagccagttccgccagttcagcggaaaactgctcgtcaagacgctgtaattcatcattggtatgcgccgcagtcatcgcaaaaaagacgctggtaacgcgggtaagtaattctccgctttgttccagtgccagaatagtattgttgaaatcaggcatttgcgggttaagcgcgatggcagcaatttctgcccgcttttgctgcattccctcatcgaatgccgggcgatagtgatgattggcaatttgatcaaaatggggagccagatacggcagtgtgctttgcacaaggaaaggattcattgttgtcattttcttctcctgaacgcgaggtgttccatagcgtaggcttactgataacggagtgcaatcttgcaatccagtattacccgctcttaagcatcccgtgctatgttattgacacacaaaagcgttgaggaacagtgagatgatcgttttagtaactggagcaacggcaggttttggtgaatgcattactcgtcgttttattcaacaagggcataaagttatcgccactggccgtcgccaggaacggttgcaggagttaaaagacgaactgggagataatctgtatatcgcccaactggacgttcgcaaccgcgccgctattgaagagatgctggcatcgcttcctgccgagtggtgcaatattgatatcctggtaaataatgccggcctggcgttgggcatggagcctgcgcataaagccagcgttgaagactgggaaacgatgattgataccaacaacaaaggcctggtatatatgacgcgcgccgtcttaccgggtatggttgaacgtaatcatggtcatattattaacattggctcaacggcaggtagctggccgtatgccggtggtaacgtttacggtgcgacgaaagcgtttgttcgtcagtttagcctgaatctgcgtacggatctgcatggtacggcggtgcgcgtcaccgacatcgaaccgggtctggtgggtggtaccgagttttccaatgtccgctttaaaggcgatgacggtaaagcagaaaaaacctatcaaaataccgttgcattgacgccagaagatgtcagcgaagccgtctggtgggtgtcaacgctgcctgctcacgtcaatatcaataccctggaaatgatgccggttacccaaagctatgccggactgaatgtccaccgtcagtaatttttatacccggcgtaactgccgggttattgcttgtcacaaaaaagtggtagactcatgcagttaactcactcacaagcaagaacgaatgaccgtcgaaacgcaacttaatcccacacagcctgtcaatcagcagatttatcgtattcttcgtcgcgacattgtccattgcctgattgctccaggcacaccgttgtcggaaaaagaagtttctgttcgtttcaatgtgtcacgccagccggttcgtgaagcctttattaaactggcggaaaacggcctgattcaaattcgtccgcaacgtggcagctacgtcaacaaaatttccatggcccaggtgcgcaacggcagttttatccgtcaggccattgagtgcgcggtggcgcgtcgggcggcgagcatgattaccgaaagccagtgctatcaactggaacaaaatcttcaccagcaacgcattgccattgagcgcaagcaactggatgatttttttgaacttgatgacaacttccatcaactcctgacgcagattgccgactgtcaactggcgtgggataccattgagaacctgaaagcgaccgttgatcgcgtgcgctatatgagtttcgaccacgtttctccaccagaaatgctgttacgccagcatcttgatattttctctgccctgcaaaaacgtgatggcgatgcggtagaacgtgcaatgacgcaacatttgcaggaaatcagcgaatccgtgcgccagatccgccaggaaaacagcgactggtttagcgaagagtaattcatttcctctcatcccatccggggtgagagtcttttcccccgccttatggctcatgcatgcatcaaaaaagatgtgagcttgatcaaaaacaaaaaatatttcactcgacaggagtatttatattgcgcccgttacgtgggcttcgactgtaaatcagaaaggagaaaacacctatgacgacctacgatcgtaaccgtaacgcaatcaccactggcagccgtgttatggttagcggcaccggtcacactggcaagatcctgtcgattgatactgaaggtctgaccgctgagcaaatccgccgcggaaaaaccgtagttgttgaaggttgtgaagagaaactggcaccactggacctgattcgtctcggcatgaactaagcgtgtgaatgccgccgatggcggcattgcttttttacttcacggaatattttgccacggtcgctttcgcgccatgcgctaataaagacaagtacgtttccgtcactcttgcagtaaacaaactattgtctggcaaatcatcaccaaagatcgccttaatcgccagcaatgactggacgcgcgctttcccttcggcactactttgtacagccttctgaataacaggtaacagtgggtcactgatttctatcggatttccctgttcatcaacaccaccgacataacgcatccaacccgcgacgcccagcgccagcagatcgaacttgctgtcatgcgccagatgccagcgaacagaatccaacatccgctgtggcaatttctggctaccatccatcgcaatctgccaggttcgatgacgtaacgccgggttgctatagcgtgcaattaatcggttagcgtaatcttgcaaatcaacgccctgcactttcaacgtcggcgcttgttcctgcaacatcaagccatacgccgcataacgataatgttcatcttccatacagtcattaatgtgctgatatcctgcaagataccccagatacgccaggaatgaatgactgccgttgagcatgcgcaacttcatctcttcataaggcagcacatcgctaaccagttcggctcccgctttttcccattccggacgtccggcaacaaagttatcttctattacccactggcggaaaggttcacaggcaacgcccgcaggatcgcgcacaccggtaagttgttcgattttcgccagcgtatcctctgtcactgcgggcacaatacggtccaccattgttgatgggaaagtcacgttatcttcgatccattgtgccagttttacatcaacggcttgtgcgtaggaagtgacaacgtcacgcataacatgaccgttttctggcatgttgtcacatgacatgacggtaaatgcgggaagtcctgccgctttacggcgagccagcgcctcaacaatcacccctgttgctgttttcggctggtggggattttgcacgtcggcagctaccatcgggtgatcgagcattaactgtccggtcgccggagagtggaaataccctttttcggtgattgtcagagagacaatcgcgatttgcggttcacacatcgctgccaacacggtttctaagccatctatctgtacgtgcaaggcttttttaacgacgccaacgacgcgagccgtccacacatcggccgacatttccgcaacggtataaagattatcttgctgttgtaaatcggcaatttgctgttcgccgccgattaagttgacctcataatatccccagtcactgaaatgttccgtagcaagaatatcggcatacacaccctgatgcgcacggtgaaatgcaccaaagcctaaatgaacaattcttggagccaggttattacgatcataaacagggagtgtcgcttttgctgataacaaattatttcccataacaattccttaaatataaatatggcaagctatatgttttgttatatgaataaaaatcccctctccggtaagagaagggattaagggtttacagacttctggaaggttgcgcagctcttacaacacgcggttgatcttccgcagcgtcttccagcgcacttaaatcacggtctttcacctctggcattttcagcgcagagattaaaccaatcactgaatatgccatgatcataatggcgatcggataccaggattccgtcatggtgcagaaaatacccgccaggataggaccaaaaccggaagcgataagaccaccaatttctttagaaatagccatccgggtaaagcggtttttacagccgaacatttctgccatggtaatgttttccagagcaaataatcccagcaccgcacagttatgaatcacaatcagtgcaaccataatggtgctcggggcatagcttttatctacaatgatagaaagcattggccatgccagcacaatcgcggaggtattcataataatatacgggatccggcgaccaattttatcggataaccaaccaaggaacggaatggtcataaagccgagaatcgaactgatcatcaatgcatctgttggaattgctttgttaaacaataacgtctgcactaaatagcctgcaaggaaagtctgaattaacccggagttacccgcctgaccaaaacgcagccctgttgccagccagaaggatttgctctggaacatgctaccagcaggtgcaggttttgctgtcggttggttactgtcgttaaccttctcaaagaccgggctttctttcagattcatacgcaaccagatagcaaagaccatcacgacaacgctcgccaggaacggtatacgccatccccacgccagcagttcctctttactgagaatgaagaacataaaggcccagattgccgttgcgctcaaggttccgcagttagttcccatagccacaaatgaggagataattccgcgcttaccttttggcgcatattccgccagcatcgtaccggcaccggaaatttccgcacctgcacccaacccctgaataatacgcaacgtcaccagcaagatgggtgcaaaaacaccaatctgtgcataggtcggtaacacaccaattaaggtggtacagatccccatcatggtgatggtaataaagagcacttttttacgccctattctgtcgcccattttgccgaaaataaatgctccgacaatacgcgccacataacctgcaccgtaggttcccattgccagaattaacgccattgccgttgatgattcaggaaaaaatatttcatgaaacactaacgctgcgccgagcgaatataactggaaatccataattcacaggtgttttttcccatcctgtggtttccttggcgttttctaggttttttcagatagttgcatttttttaaaagcatcctaagttcgatctcagtgtctatctggggcctatttctgtcccatatatgccccaaaaaactccccaacagataagtagttttttcatggatttacgcgtaaaatcaataacggctggaaatcattcaatactcgcactatcgaaaaatttaccagccaaccgcagcacgttcttgcataaggcgtgtctgcggtttttcaactattcagatacatcactcccatcacattcattcctccgcatcaaaggcatataggctatatcaccttgatatttttcttcttcagataaaaattgttatctatgtatacttttaaacccaatccgtgtagagtctctgcataagatagtttgcagttgccacttcagattgcgccataaaccgcctgatttttgccgccacctgttagcattcctgtatacctgaaacgacaatgtttatctacgaactttctggattatccctttctgtgctgtcgttgcatcctgtgcggtgtatttcccgttagccaggtcatacgcggccttaacggcttttggcgttgccgccagtgactcggaagtgctgttggtcgcactgctgagctgtactatcccctttttcgtcgtgctcgcatcctcaagcgccacggcggatgcaatatcctctgcccgttttgccgctgtctcagcgcgcgttgctgcagattccgccgtacttttgctctgagctgctgccgtcgcactgccagctgcctctgtcgccttcgtggatgccgtcgtggcgctacccttcgctgctgacgcctgtctggtcgcctcatcttttgaagcagacgcagatgatgccgatgacgacgccgaactggctgacgatgcggcagccgtttttgaggattctgcgctggtttccgacgctttcgcgttcgtttcggatgtcttcgctgcggaagcagacctcgctgctgcgctggcctgttcagtggcttcgccagccttcgttgtggctgttgaagcagacgatgcggcgctttctgccgattttccggcggcggtggcactggctgaggcctgcccggcacttgttgacgctgcactggcagacgacgcagccgctgtttttgagcctgccgcagccgaggcgctctgtcccgctgccgtttcagaagacctggcgttcgtctctgacgtttttgccgccttcgcggaatttcctgccgccgttgccgaggaagcggcactactggcgcttgatgatgcgttcgtttctgatgatttcgctgcctcttttgaggccgccgcatcccgggctgaggtggcagcttctgacgcctttgtggtcgctgcggatgcagaagtggctgcagatttttgtgacgctgccgcattcgtttctgacgttttcgccgcaccggcactggtagctgccgcgctttttgaggactctgcagcggcagcactttttgatgcttcagtggcctttgttgatgccgttcctgcgctggaagacgctgactgagccgacgtcgcggcctgcccggctgatgtgctggctgcgcgtgctgagcctgcagcatcagtcgcatgggttgccgcctcacgggctgatgtgctggcatcactggctgacttcttcgcggctgccgtgttctgtgccaccacggacgcgttacgcgccacctcttccaccatcagctcaaaacggcgcagtgcctccggacgggcatcatcctccgtcatggcaccgagaaaatcattcagcgtaccgggtcgggaatcttcatacacggtgatggtcccggcatgtgacggcgggaatccttccaccaacagaataacgctgtactgaccgtactcaacgtccatgctgtaacgcccggcttcatccggattttcagatgccagcgtgttcaccaccaccgtggtgctgttacgttttgctttcagctggattgtgcagttctgtaccggttttcctgtgccgtctttcagtacacctgaaatctttactgccatattcaccccacaaaaaagcccgcctgaaccggcgggctgtcataacactgtgttacctggctaatcagaatttataaccgacacccacgatgaaaccgtcagtgcgccagtcaccactgccggagccttcataagcaatatcaatggccacggattcggtcgggttaaactgcacgccagctccccacgccagagacgtgttgctgtggcgaccgtcatcacttccggtcagcacgtcgtgcgttttccccttgttgtcagttacgcggagataatccccggagaaagtcgacacacggctgtaagccatacccgccatcgcatacgcgctgaaccattcattcacgcgcacagacggccccgccatcacgctgaaccagcggttacgcacggaatcttcatgccagcgggtatcgctgtaacgggtaagctggcgattcttgtctcctgcatagctgaatgacgtcaccagccccagtgtgtccgtaaactcataacggtatttcacgttaatcccgttcagatcatcgctgccgggaacgttcgtcgaggcatgaagataccccgcgctcagcgtggactgatgttcagacgcccatgcaggcgcaccggatacggccagacaaatggctgcggacaaaatggcggcataaagtttacgcataattacctctcgcttttctgcaataaaaaaggcgtcatttctgacgcccgttctgggttataaaattcagctgatactgatacctgctgtggattttttcatcaccacaaccagcagatcgctgatactggttgttggtgtccagttattcgctcctgatgaagatacggtgaatgtcagtgtcagcgtcccctgtccggcaggcatatctataactgaggaaaatacgccctgagcatccgtcgtggactgattaaaaatctcctgaccattgcgggtcactcttaaccggcaggttgaataccagtatgactgttggttattactgttgaaattctcatgcttaccaccgcggaataacactggtggtatcatgacctgccggtcaaatttctgatcatcactgattcttaccgtgatggtgccactggcataagtgctcgtgcgggggaaagacttgctgaccgttttgacaatatcaccttcaatctggttggctgacagtttccccttaatctgacagttctcattaatcgtgacgttgttgagcgtcccggcgttcgcattcacactgccactgatatccgcatttttagcggtcagctttccgtctgatgtcagggaaaatgccggtggatttccaccactggtaatggtcggggccgtcaggcgcttcaggaacacgtcgttcataaatatctgattgccctgcgccacaaacatcggcgtttcattcccgtttgccgggtcaataaacgcgatacggttagcggcaaccagaaactggctcagcttgccttcttccgtgtcctccatgctgaggccaatacccgcgacataatgtttgccgtctttggtctgctcaattttgacgccccacatggcattccacttatcgttagcgtcctgccactctttcgaaaactcctccagtttgctggcgttatcctccgtcagctcgactttttccagcagctccttgccgagatgggattcggttatctggcctttgaaaaaatccaggtaaccttccgcatcatcgctcgcctgaccgacagcctccacgaatgccgatttgccaacggtgttcacactgcggatataaaagtaataatcatggcccggtttgatattgatactggcggctatccagtacagccccgcgccaaggtagcgggctgtggtttcaacctgcctgatatcggtaatccgcttttccgagaaccagaactcaaactgtactgtcgggtcataaacggcaagatgcggcgtggcggttatctgaaaatagccgggcgtcagctcaatccgcgacggcgctgccggtgcggcaatccggaacgataccgacgccggatcgccctgctgtccccacgcatttaccgcccggactgtcagcgtgtagttccccagcgccagttgcgtgaagcggtatgtggtttccgtcgtccgggccgtgctgaccagccgctcactgccgtcatccgctgccacggtcaggcgaagcaggaagctcacgcccttcaccaccttcggcgtgtcccatcgcgccagcacctgatattccccgctgtctgcagtgacttcggcggtcagatgctgcactgctggcggcgtgacaccattcaccgtgccgctctggtcgccgtcaaagtgcgccccgttatccacgatggcctctttttccggtacatgctgcacggcggtgatggcatacgtgccgtcatcgttctcacggatactcacgcagcggaacaggcgctggcgcagcgtcggcagcttcagcccccacacgctgtatccggcaacgccgtcaggaacacggctcacttttaccttcacgccgtcggtgacggactggacctccacgctgaccggattgccacttccgtcaaccaggcttatcagcgtggtaccggaggatggcagcgtgatttcacggtcgagcgtcagcgtccgggtctggctgttcaccgccagcacgcgcccgccgatgctgatacccgcatagtcatcatcgcagatttcaatgacatcccccggtacatggcgaagcccttccgcacccacgctgaagtccacggtctgcgtttccagcagttccgttttaatcagccacagcccggcgcggtgcgcctgcccccggctggtacagccaaaggcatccatcttcgtgacgttacgaccgtaacgggcaatggcctgcgtatcttcaacaagctctgtcgccgtctcccagccgttgttcgggtcaatccagttcacctcaacggcattatggcggtccttcagggcgctgaagctgtagcggaacggcgcgccatcatccggcatcaccacattactgcggttataggtccacaccttatctgatggtcggtcctgcacgaacgtcagcgtctgcccgttccataccggcatacagcgcatcgccgagcagaaatcactgagcacatcccacgccttgcgctgtgtggtcaggtacgcattacaggtgatgcgcggctccgtgccgccaaagccgtccggcaccgactggtcgcagtactggccgatgacatacagcgcccatttatccacatccgctgcaccaagacgtttccccatgccgtagcgcggatgggtcagcatatcccacatacaccaggccatgttgttgctgtatgccggtttaaacgttccgtcccagataccgctgtattgccgcgtctgcgggttataatttgacggcacctgcagaatacgcccgcgcagatgataattacggctcacctgctggctgccgaactgctccgagtccacctgcacgccgaacagtgccgtgttcgggtagccctgtttcacatcgataatttcggtgtatgacgaccagagcgttttgttctgcagctggtctgtggtgctgtccggcgtcatcctgcgcatccggatactgaacgggcgcggcggcaggttatccaccaccaccgaggccagatactgtgaagtggttttacccttaatggtgatgtctttttccgtcacccagccaccgttacgttgtatctgaaccagcaggcggacttccgatggattcctgtccccctttgaggtggtttccaccagtgcctgcacgccgaaagtaaaacgcagacggtcaatgtttgccgacgtgatggtccgggtgatcggcgtgtcatatttcacttctgtaccgagcaccgtctcggagccggaggattcaaatccctccggcggtgtctgctcctgctcaccggcccggaacaccaccgtgacgccggatatattggtattcccctcactgtccagcaccggcgtactgttcagcagcacgctttttaatccatccaccggaccttcaaccggcccttcgctgatggcatcgatcacactcagcagctgcgtggacttcaggttgtccttcgcttcgcgcggggtatgccccttactgctgcctttacccattcgtcacgctccataaacgacaaaaccgcccgcaggcggtttcacataaaacattttgcatcagcggccaatcaccacaacctgaccaccgtccccttcatctgccgtgctgatctcctgagaaaccacacgagaccccacacgcatttcaccgtacagaacaggcagaacattgccctgggcaaccatgttatccagtgacgagaaatacgtgttctgtttgccgttatctgtactggctgccgtgggcgtcctggctttcggtgccagcatctgcgccacaccacccaggatcatactggcccctgctgcatacagacccgatacagccgcggcccccagccagccaacagggttccaccatgccaccgcaatcagcgccgcacccagcaccgcctgaaacacaccgccacttttggcacccgccagacgcggaacgacgtggatcacggcaccatttgccagcggttcattaagacgggcagataattcagtttcacctgcatcacgcccggcaatgcgtacctggtaccagccgtcgctcagtttctgacgaaatgccgggatctgcatggccagcgcccggatggcttcggaccccgttttcactcgaaggtcgatgcggcggccaaatcgttgtaaatccccgtaaaggcagatgcgtgccatgcccggtgacgccagagggagtgtgtgcgtcgctgccatttgtcggtgtacctctctcgtttgctcagttgttcaggaatatggtgcagcagctcgctgtcaccacagtaaatggcggcatgattcggcaccgatgaaccaaaacagcacagcagcacatcgcccggctgcgccgctgacaacggcacctgatacagccctgtggcctccagattatccagatagagattctgaccgttacgccaccagttatccccgcgatgaaaatccggcatctcaattcccgccagatggtaagcgtcccggaacagcgtgtaacagtccgtcaccccgtgctcaaagcgccgcccggtgagatgcggcacacagcggaatttatgaatcgccccccggcagaccagccaccacggcaaatcactctgtacctgcagccgccggtcggcctcactcagccagggcagaccaccggggtggctgtggaccagcgccacaatctctccctgcatttctgcactcagccagtcctccggcgacatccggaaatacgcctccggctcaccggagatattcacgcagggaaaatatctttcctcctccggcgttctcaccacgaagccgcacgactccgctggcgcacatcgccgggcgtgcgccagaatcgctgattctgtctctgtcatgggatttactgcgaaagtttgttaatggaaaggaagctgccaaagttgccgacattattgcgaaacttacagccactcaggcatttgctgcatttatccttcgtgatatcggacgttggctggtcatattcatccgcgacagccggaccgctataaccgcactcgtcaccgcgataggtccaggtgcaggtgttggccagcatgatacgtcccggaaaaacagcgccatccgtttcagtcggcgtggacagtacaaaagaggcactgaccgcgctcagttcgctgcactgctcgatgcgccagcggctgatcacctcctgctccggatcggcttcgctgtttccgttgacgaagttcaccgcatccagaaagcgggcgtaaaccttacgccggaccaccgttccgccgaccagactctgcagatcttccgccatcccggtgatcatgccgtgcaggttagagaccgtcagtgtcggacgggcagcactgcccttgccgttcatctcaaatccactcccctgaatgggataggcctgatactgccgactctgccaggtgacagactcacctttttcgttctgctcattacagaaaaagtagcgatccccgcctacctcggtcaggtcgatttcccagagcaccacgctggccgactgctccgcacgaatgcattcattcagcgtttcctgttgtatgtcctgcatcagatcaccacttcgtcaaactgacacgaaaaatcggtataggtgatatgttctgtcgctgaccacgttcgacacaccactctgatttttctgttaatacccggcgggcgccaaaaaaaagatttatagccttcatgccgggctaaaaatttttcaaatgaatcacgttcattcgcctcaactttgaaatcacaggtgaaaacgcgcagagaatgattaagtccatttggacttcgttgctcataaccatcgccaaatcttacagtttttatcgatggtttattttctgttttcattccatcctctggtaaccagtgaaattcttccgtattagccacttaatattcccccatcacgtcgcatatttaacagattgccctgcacccgctgatcaaccatccccataagtgcttttattgcctgagggccaatctctccattctggccgtcattttgaatagtgatttggtatacaggggcataggtaatatctccgcctccattaccacttttactattaatagctctgacaccaagagaaccatcggaagttcgtgttaatggcataatggcttccggtccagcctcaccaaaaacaccagccccttttgcaaaagcaaaaaattgcggggaatcataaataccgttcgaatacgtgctcaatgacggagactcataaacaccgccctttgcattcggaataaatttactaatagcactcccgatagttcctaaaatccccccagaagaactgttactaatgctgtcgaaaatcccagtaattgaagcctttaatgctattcgactaagatccgaaatcacggaagtagcgaaagaacgaaaatttgccttgcctgtcgtgacaaaatcacccagcgcatcggtcatcccatcaaacatctgagtcgtggttgattttatctgctcactgatatccttagtgtcatccagccagttattgaatccctgggaggcaccactaacccagtctcctgcctgaatatcgagctgctcgtttttctgtctgacaatttctttttctcgttccagagcatcattcagagcctgcattttctcctgaaaaacatgatttgacatcccacgggatttatctgcatagtcacgttcaagttgcagacgctgattgttatattcacgttcaatccgcagtaattcctgctggcgttgctgatttttatcgccaaccccataaccagcaatctgaatatcatacccctgttgacgattatcaatcgaagcctgcaatgaatcacgccatgcagctatttcggcggattccttgattagcctgttatttttttcaatcgcaacatttttctccatcaacgcggttatttcttcccggtgtaagagaagcgatttctgatcctgggttaatttcgatgacggtcgtgactccaggtcggcaatctgctgacgccacttaaccagttcctgttcagaggaacttaatttaacggttaattcagtttgtgaacttagtaacgcattctgttgattcagatgatcaatcattcgttgggcagcatcatccgaataacctttcgcctttggttgctttggatctttataacgctcatttatttgagcgataaaattattatattcttcctttgaatactgactctttagcttttccagttttgcaagttcactagctctctgctgctcccgggtctgatattgttttgaaaaggcatctgctctctgtctgagtttaattccttcctgttgtcgcttgttgtaatcgtttattgatgaatttaggacgtcctgagcaattttttctgcttgaagtacgcccaattgctgctttaatcgtgccagccttttattttgagctccgccatctccaatgccacctaacccgaaaactccgggtcgggtatttatttctatttcatcaatttgacggagaacatctgagattttttgatcaagggaggcctcacggccaatgtccagcatggaatcccatgcccattttgcggagtctgcgacagctttccatgcagtctcaagataaccaagattttctttaatctggttggtgcgctggatcattgaggatgagtatgcttctgtcgcaatgcgggcggcctcctgctggttcccttcatcctgtagcgccttaatctggttataagtcgcaattgtcagaaaatggtactgatcattaagttttgatatggcactgacaggatcctttgcaatttcattgaagtcattaaccagttgttcggttgatattcctgttacttcgctcgtttttactatcgctgtcgtcacttgctccagcgaactgctcgctacctttcccgaacgcacaagctgatttaatactgccgccgcagcaccagttgtcgaatcagccgcattcccggcacgttgagctatatcggccaattgcccgctggttgtccccaactgatttccggtaagaataagagatttattaaattcgtcctgctcctgagagcctttatagtaagccagccctaagacgccaacggctgctgcggccagggtaaaaggattaattaatcccagcacataagaaccaacacctttgatcgccgggccaatcccaccgaacatatcttttagctggccgccctgctgcattaacaccaaaaaaggcgactgaccagtggacaacccaacaacaatatccgtcatttgtgcaggcaacatgcgcatagcaaaagccgtttgttttgccgacattccggttttgcttaattgagattgagtaacctcaagctcactccgcatagcacgaagttttccagaaagttcctcatacatttcaggagagagcatccctttagcttttgcttcattgagctgtttctgttgttctaccagacgattaaaagcagttccgacagggtcaagttgagcaatcagacgttgcaaagcagcaacctgttcatcatgcgcttttgctgcttctcgctctgcctgagcctctccggtaagctctcgccgtgtttcctgtatttttcggctataattctcaaactgagaaccatttattttcccggatgcaaacgcagcattaagttcatcctgctgttgttcaagatttcttagcgccgcaaccagagggtcgatcttgtccagcattctttgaaaggcctgagcctgcgattcctgctgggcggcagcaagttttccggccttctcggcttctctctgcgcttgcgcaaccccgctcaattcctctgtggtttcattaagtttacggacaagaaattcatattcttctttatcaataagccctttatcgaaaaatttctttaattcagaatagcgtcgaccgacagtatcaattgcggcaccaactggatcaatagctgcttttaattttgcgagcgcgttcttctcatcttctgttgccttagtcactttccctgcgctatttgcagcagtttccccggcctgcgtcattttgactaatgaggaggtcagattgtcagcattatttttcgctccagtgctatcaataattattgcgagacgcgaggtttgctctgccatttattaaaactcctgacaacaaaaaacccaccgcgaagtgggtttcaggcgacataatagtagatatagcgattacgaggccacgcaacgcttttctccaggagcatcatcgatttaattaaagacaccatcacatctctgtaacagagtgtacgtaattaacaactacacacactgctcctgaaaatactggtcatccagtgcaaagatcactgcttcaaattcatcgcgctcaatcaataccggatgagtggctaaatattcatttatctctgtcagagataaaggcaaaggcaccccagccattccagcataacgtcgggcacgggatattaccgaataggcgtacaacaactccttaagcaccgggtctatttctggttccggtatcggtggcaacctgagtttttctcgcttccatcttgccttttcccccctttctcccccgaactccgataaccaccgctgggcagctatggcttttttatcgtatcctgcttctgctgctctttaccctgggcgatgctggctgcttctgcaaggatctgccagtacaactctggattctgcttaagcagcgcgatccctcgttctgccgtatattccagtgcaacctcaacaccattaaccagttcaccaacccctttccagtctttcagcagataacgagcggcattatcaatgagtaaatcatcaacagaatccacctcggaaacctttgaaatatcaaactccttcgttccgacgtgcaaactggcatccattttctcaatgtggcgacggattaatgcattacgggagcgatactgatcgttatcgctgcttgccaccaacagttttaacccgtctacaggttttaagtccttcattggcgtaaaccagcgttctccaccaatgataattttctgattaagaataaacatccataacctcattcaatgcgtccccctgtagggcagtaccacaggaggaataacggaaaatcaactaatcgcctcagcactggcttttgcgatcacggcagccggggaattttttttctggttatcgtaggtgcttcatctgctgcggtaatgctcaattgaacctggataatgtcgctattacccccatcaggccattcacctgacacctgaaccttcgggaaactgaaagtgtatgccccctctccattcgaaagcgtgaagctgaacggaactgtttctccagtcagtgttttactccagatttcccacgcggctttagaccatgaaagcgtcaccgtaccggacggtgtaaaagtagtcggaatatttgctcctgcataaggcgagccagtcccgatacaacgctgtgtctggagtttgttatcgaactgaatatcaaaactgtcgatacaaaaaccgttacctccggcaacaccattcaggcttactgctgaaacctccttaaacgaataacgtagctttcctgcactatccacaggttcgcctttgataaaattcgtatcatcggcctttgattcccagtccagtccggcaaaggttacggtcgctgtaatatcgccgtcgttagggatctgcattttccatgagccaacctgcgctcctctgacgacagaggcaattccgacatcggacgcataggtcgccagagaaaatgttattcgctcattccccattgtcagagaatcgcctgaccattccgcgccgaaacaggatgcaagaaaatcatcatgttgaccccagcgaaatttggtaccaacatcaccgccgacatccacagtgccaggcgtcgccccctgagccatccgggagccaccaatctcattattttcgcctttattctgggtgggttttactccccagcttgtgcgttttaataaactccagtcaccacttgctggcgtagtgcctgcaaccgtctcccggataaatgccgagataacctttgcacctgaactcacaggagcctcctatgtcattaattgcgctagagcgcgcgatatggaatttgaagattaagctggaaccagccattcttttcgccaacggctattgaggaaacagcctggtaactgagacgatcgtcatcctgaaactcaaacagttcccgcaatttatcggctgtctcagtaatgagttttgaaccagaacctgcggggacaaataactgaataatgattatccccgagcgataaacaatcggccccgcgccaatttcattaactccagcctgcccgggaatattacttaaccgcgcccagattaacttaccggaaggatcgaacgttggcgcgttcggatacaatacgtcttttccatcaataatcgtctgtgccgtcattctggaaataaccgtatttctgatttcagtaaacgtcatttgtaagcctgtaaaacaccatgaaaagcgttggcatacacgccagttggcgcttgttgtgaatgaccgttttcaagagcctctgcataaggaaggttattctggatataaataactccgtaatttgcagctttcgaaataaccccgatcccacgctgaaccgcaatcgtaccgttcggatccacgttatcagatataccaaaatcgggatgctgtaacgacaccaggttgttattcctgaaacgtccggtatcaaccggagcagcaatatcaatagcagtaagaatctgcatagcgatgtagcgaattttcagccccacatcttcctcaatcatcccggcaaatattgacggttctatatcccatgcctttgccatttacgctctccttaactggatagagtaaactgatgcggaaggatctacactcgctgtaattacctcgtatcgttgtaactgccttaatacaggatcataaatctcaataatatggtcgacagcgggtttatccgtaacctcgcataccagagcggttaatttaaggtcaccatgcaaaatattaatcccatcaattctgcccagcttataacgtgtcaacacgcctcgcccggtatagattgcggtggattcgccgccagtttccgtcacaggatcccagtgccggtgcgtaacgtaagaaccagaaaaatcactcacggcgtccgctaaatcctcatcaaaagcagcggcaacctctgactgaatctcttcacgaagccccattatccccccctcacaaccctgacttgtgagcgactaagtccgtacggtttcagcagtgctatcgcaagctgtaaatcgggttcaagcaatacagtgctgtttgctggcaactcagcaaatgatttcgatacactgaccccgtcagccgacacggctttactgataacaacgccagaatcatttttctgctgaaacaacttaccgaatgaggcaattctggctgcatatgctcccgcaagttttacctcttccggaatacgggatgggttaattttcaggttgaagccattaagccaggcattagccattaaaacagctttatttttagcgttctcactcgtccaggcgttcccaaacgcattatcaacgtcatcacaggtcacgtaagtgatcatgtgttactcctgagttttccagcccatagccttccagttgtcaacttcatcaggatgaacattagcgatagttggtgcgccgggaaacatctgataatcggtcaccataaccactaactcaatttgcgttttttgtgcggcttcacgctgtgctctttgctctttagttaatccggccatatgccccccattaaaaatggggccgaagccccgtttgaatgtttaaccaagaatcagacaaccatgtgccggcttcactgatgaaacaccccatgccagtccaacttcatagcgcacctggcgatactgacgatacagtgcaatctggaacgtaatccctgaaatcgggtccgtaacattcattacatcatcagcattatcgccaccttccggcattgccggagtacgggatgccagcagaaacgcgttgcgatcaaacgccatatttgcagtaaaggccccaacaactgtgatggcagtatcatcggccagatcctgacgcagtccgggcgctgcaagagtaatcagattgctggtcgctgctgccacaacatactgattcggatcaccagcgaacgtaacaatctgacctgcagaaatactccccgaaccagtatcaatggaaataagaacatcgccttcttttttctctccattcacgagataaccagttgcagcaacctttggcgctcgtttcacacctgccgaactgtgaatattgaatccctccagacgccccaacacgccctcacgcagtagctgttcagtgccggattcattcactttaaacaatacagactgttttccgcgcaaattagcaatggcagtggagccaagcaccatctgcagatcggttgtcggtgcgccgttatcctccagaacctgacgagccagagcagcatcagaaagatcatctttaacaccaaacggcgttgtccctgcggttcccacggcgcgggaagcaccgaaatacaacgcaccaagatcagcctcaacctcgtttgcaagggcgcgaaaagcctgcttgaactgatcagccagaatggtgttgtaagtccctgaagggccaagagccagttgttcttcaccattccatttaaccggtgccattttggatttagtaatttttacatcaacagtgccaatattttgatcaccggtattcggagctgacggccccggtacgatatcttcggttttcgcctcaggcgcaactggcgcggttaccgtctgatcttttgctgcggcgtcagcttttgcgttttttgctaccgcagggataaaacctacctgctcacgggatacaacatccagggcggtataaatagtcgggatcaacccggtcagggtatttccagccataattaaatattccttaaaaatttgcgtaattgtgaatagatggagtaatgagctatccagccctgacaccagctcccatccggaagctgacaaatgtgttaatcaacgattgtgataccgtctttcaatgcgttttgcttacctgcaacatccagtgcatcaaaagcagagcgtttcatcgttttctgaccaatatcatgctgtgtcggacgggagccgccgccattgttgccactggctttcaggatgtagtctttctgagggtaattttcgacaaggaactccagcgcctcatcaaactgcgccagttcgccaggcttcgcgcgggaataaattttgttgccggaagcgtcataagcaacgatcctcccttcttccactttgaatgcctgcccgaagcgggcttgtaataaatctgccgggatcgcaattttatcggcaatatattttgaacccgcaaaactaccgccaatcatagaatcgtaaagctgcttctccagcatctgagagcgttgcttttcttcatctaattgctgctgaaaatttttcgtaatttctgccttaacctggtcaacctgtcccgcatcgagcagctttttctggtcgatttttgacagcatttccagtgcctcgatcgccttcttcgggtcttcgatagcggcaaacttagccagtttttcctctgcagcttctttagccaggcgatgattttttgcctcgccattaagctctgtaattttttttgtcgccagcggtgcatcgaagccaatttctttaccatcgtcgtgcacataaactggcaggccagcagtatcaatttctgcgtattgttttccgttaatctcgaccgttttcagtttcatattagtacctggtttaattcttccgacagttacgctgctcaccatccggatcgcagcaataaaaaaggccacccgaaggtagcctgttgtaataaatgatttatttaaatccctgcttttctgaatacctgtgcatcacgctcacggagctgcttcagcgtcagccattcgcctttatcggtgtaaaattcatctggcgacataccaccatcccgaatcagctttgctcgggtttcccccacaatctgtttttgtctggtgtaaggctgacgcaaaaaccattccctgtaggttgtatctccggccaccacgccatccatgctggcccgctcagccggggaaatatcgcgaacatcaatacccagttccttcgctgatttcagaatgaacgtttccgttgagcggcagcagaaatgaatttttcccggcccctgcaaataaggcacgctgtgacctacaggtttattattcagcgtatatttgaggcgatccctgattcgacattgtggcgtagtacgattatcaagcgttgataaccattgcttacccttaatcaaatcattattcgcgctggcaaaactctcacgggcagtagcagcaagatgtccaaccgctgtttttgcaatgctggccgcattagcccggctcatctgcaatgcaccatcctgaaatcccttactgacatgtccccgaatttttcttgcgatctgctcattggtatcccccagcaaaaaaccctgacgcactgtatttgttatgcgtctgagccgatccgcctcaagatctgaggcccactcactgagcagtcgtccctggaatggtcgcgccattgcagcggcataaagtgcatcaggagagataccaaccagagggtgaacatcagcaacaaaatcaggtagcatagaatcaaacagacttaactgataaccagcctcataaattgccagctcgttcagctctccggagagactggtaaacatgctgttaatagcagtgcggttaacctctctgacgctcgccagaagtgactccaggcgcttaacggtaaaactacctggatcgaggctgtccagtgctatcagcaggcgagcagtaagttccgcatcgctgtcattcagtattttcaccattctggcagccacgccagtgctatagcgggatatccagactgcatgagcaattgattcatcacgcagccgttcattcacggtttgcatcattgatttccatcagcattacactctgattttttaattcatcgatcacttcctctggacgggaatcctgatcgataaatttcaacgcctgcaacacccgaatcgcatcaatctgacgtatatcaccgccctgacgcaatgactgaacagccagcgcggaggatgagtcaaacacctgggcagatacatccagttcagtgcgcacatccacattgccaccgtaactctctccgatccattccgccattatctggagaatattatcgagggcatcttcgagggagttcgccattgtataaagcggcgagttttcctgcattcgctcttcattagtctgatcaacagatttggtggatgtattttcagcacgcagaagtttagcgccggcatgacgcatctgattttccagcttctcaagtgatgtttcgccagattctatcgctgcgccactatgttcaacatattcgaggccattttttgttctgtcctcaaaaatcgtagcggtggatgcaccaaccgtcagttcttcattcctgtccagcccgtaggccaccagcaatggaacgcgggcaacatgaagaatattgtcctgctcgctctggctttgccagtgcttgatattcagcaagccaagattaagcaatggcggtgtaccacgcataaatcctgttttcttcgtgtacagtgttaccagaggaatatcatcacggctggtattccatgactcatgaagcgtccagacagattcgccattagtgccttcgctacgtcgataaatttcaactcgacggggcataatatggcggatctgctccaccttcttctgcccgaaatcatcaccatcaataatgatgacctcttttatacgcaaatcagtgagaacaactttccctttttcaactttcgatttccatccaataacctggcgtggattcagcatcgtaacgtacggacgactaccggccgcgttttcatcggcttttgtccgaatctctttcatatccgttcgtggatagtccaccagcgcatgtgccacaccatactgaaatgcgaggctgaaaaattgctgcgcccacacatccagtcggctcccctccatgtcgatattttctgcatattccctgatttttgccggcgtttcctcactcaatactgtcggctctgcaaatatgcgcccaatattttgcttgatgctttcttcatacacaggaagtagcgtagccacagacaggcgttttttataagcgtcttcatcttcgttaggccattttgggagataattttccccctgcctgcgcatttcaagcgtaccgcccatcagtgcgtcgttaatatcccacgcctccagcatatcgttatagtcgaggttgggtgttgatatatcagccataattaaatccgaagtgatgtgactcttccggtcggtttgacaatagggaattgcttaacgatgaaataacctccggcatcattcgggtgatcattgccagattttttatcaggctcccccttctcatcccagacctgttgctccagagattcggcatataacgggcaacgcttcacattaactttatagcgacgctcaccattggcattgcagaacattgcattcattgagttaacgcgatcttttactggcgggttcgagctgttcaccacaacgttaaaaccagcctgcttaagctgggctatatccgtcgtacttgcgttacttgattttctggaatccccggaagcatctggataaatataaatttccctcactttccggtaatcattcccatcatacagccagaagcgttctttaatgatgcggatcatatccggcgtatcgtaggcattgatgatttcagttaccgcacatggaagccccaaacgcagcacatggacgattcccgccatctttccaacgttaaaatccatcccaatataaatcggctcccctggctgctccacttcttcgcaattattcagtttccggtcaaactgatggtaaacagtaccacttgtcaggttagtaaactgtcctcgcagataggctttaatcagctctggagggtatgattcaagaagcgaaggaatgtaatctgctggcaggttcttttcattatcgaaagtagatgcctgcaccagaccatacagtgaggccagctctgttttttcacgcacggctttaacaaactgctcgtagacaaatttgaatccttccggcgtggttgtaacgtcaataccgttgcgaagtccatcaatcttataacgcatacgcgcaattatcttgcgccacgccgttctggctttttccttcggcaaaatgtccagttcatccaccaacgcattaccaattttgaaaccgacgatcgtttgtggcttctccatcgatctgcagatagtggttccccgatactggcgtccgtaataaaagtgaacctctttatttccctcattaatttttacgttcaatccccagtcagcagcaacttcttccactgtagggtaaaaaatatcgcgaatttggggatacgttggcgcaaaatatccctgatttatacctggatgctcccaaatccccttgcatatgccgccacacccaacccatgttttgcccgagccaaaaccagcaatataggctttaaatttatggggcattgaaagaaatcgcgcctgaggcacattaagcgtcggagagatcatcttcatcactccttactctggcatcaaccacattaatattgatcgccacaggctggggatgttcattatcttccaccgtttcgatctctttgcgcagcttctggttttccattctgcgccgttcaatttccagttcctgtagccgtttatctgcacataaagccccgccagcagaaaacaaacgcaacaattcacgccgggcggcagccttatcctccagcaggatctcaacgccgaattttccgaattttgcccctgcatataattgccgcgcatccccatcaagcagagtggtatcagccatataaagctgtcccgttccctcaccgcagcacttcgggcagtccggattgggtatggcgttatcaacaaagccgaggcctccatattccggttcgggtttgccatctctggaagcctgcgccgctgccttgtcgaattctgctatatcgcgccactggtagagatgattctcgccccagcaataacggcagttaacacggcgaaattgtgcaagctgattggggtcggccaggacaatagccatcaactgactcactagtaaatccaggtctgcggtatagcgtttctggtactgattgcggaagtagctgatagcgcgaaaaaccctggcatttctaagcatacgactggcgttgctgttagctgtcgcaccttgcccctcataaccggctagtcggtacgcctctgtcggctttttaccctgagcaacaagcatcgcaaacttagcctgctggtcagaaatgccgaattcatcgggacagaacgaaaattcctccgcgtcgccctcattcaggcccgcatcgaatactggctttttttcctgagatttttcgttccgcttttgtgcagtctgcgcagattttttctgcgcacttttttgcgcagttttgcacatttctgtctgcgcatttttcggagtttttttgatgtaacgacgggctgttgcgtaattcagtccccttgcttcacaccatgccaccggagatataccggagcgggtgtattcagcaatatactcctgctgcaacgccccccagtccggtctgctcatcagttagtcctgatttttatccaccctgagtagttcgcgcagagcaaaggcatccccttttctggcaagcttaaacaatgccgctcgtaactcggcttcacctttcgctctgcccttacggatggccgcataaaaatctgtcattgcttcccgattttctttcagtcggttcagatcaacatccagaacgtcagcgatttgttgtgcagtcatccggcacgctgccagagactcgactttcgaatacggaatcatttgtcacccccattgatatgcagggtgtcttcttcctgtatttttcgtgaaggatttttactgcagcgttgttccaggtgacctgatggtgaatgcgtttatggctggcacccatcagtgagatttttacgcacgacggcgcatacatgacggagtaaaaacttttaacgtaggttccggaatccagatacagctcggtcattccgccgctgtttttctgcgtctgtttctgccctaactggacagcaccgatcgtcataaacaattcaccacagcgaccgagattcgtgtacgtattcacatcctcgttaatgcgccccatgaatgagaacggtcgatcaaccgaacagataaagctgttcattgccttgcgtttcacccacgaagcatggccgccattgtcaccaagaaaatccccgccctgcgacatagcgatggaaagagcaggtattgattcgtagtacgccagcatttcagaaaggatcgcatccagtttccttatcggaaaataggcctggtcatagttgcgatccacccgaaactggaactcgtgataatcatcatcgagctgaatgaagtatttacacccgaccagttttgccaggtcgaaacaggcattacgggcgtaaaaaattgagcggcggtcacagaaattatcggcttcgtcaaaacgactggcgatatcggctttggaaaacaccagcacctgttcaccaaattcagccatgtactgattccgtgtcttatcttcatcatcaacaacgataaaaattttcccggtatagccagcacgacgcaacgtccggtaagtcagaactttgtccggtcgcccgtgagtcagaataaaggcgcaaaaatcatcacgcatattcctcctcctcaccaccatgcatgatctccaccatgcgctgcgtcatccggacaaatccattttcaatagcctgctgataatcaatgatcaccagcgccgactcctcgaaaaaacactgaatttcagcgggggcgtgagcgtaatagtccgcaattctgctgaaattaaacaccgtgtgacgttctgccgcacacaggaggaatttctcaatatcaggctcaagggacgccgaacgtatccggctgatcagctcctgagttttcgtatcgtcgtacagttcactgatatccggtttaccgcccgacggctcataaacaggcgtatcaattttcgtcgtatacggctcctcctcatttcctgtaccgggcaaaacatccgtcaacagttcatcaatttctgtcgggatgaagcctgtcagggagacatcaaaatcagcattgattaggtccgacagctccatccgcaacagatcttcatcccagccagcattcatcggcaggcgattatctgccaggcggtacgcctttttctgctcatccgtcaggccagacagaacaatgaccggaacagaatccattttgagcatttcagccgccataacacgaccgtgacccgcaataatttcgcccttttcgtcaatcagcaccggattagtccagccgaattgcttaatactttctaccagttgtgccacctgctcagtactgtgcgtcctggcgttgtgcgcatacggtgacaattcttgtaatgggcgatagactatctttaatttctcgctcatacagccttgctttatgaataaaacgcaccccagcagccagtgctactggggacggaggtgttgctggtaaagttaggtattggatcaatgagtgagtcaacataatattaaactcacaattataaatcagccatatattaggagcgccaaaaaaaacctgaaaacaatataataacaggataaatctcaaggcgaccaagaatcatagctatgcacattaaacattttgcaatgtcattaagcactccgaatgacgatgcagtagccccaaaacctaatcccatattattaatacatgcagccactgttgcaaatgatgtaagaaaatcatatcccataccatttaacaccagtataaaaaacaccgtgaagagagtataaagaaaaaagaaactccatacagacctcattacacgatctgtaactatcttccctcctacatttacactcaacaacgctctgggatgagaaagctgatttatctcgtgtttgctttgtttgaaaagtataagaaatcgaagtgacttaattccaccacaagttgaacctatacatcccccaaagaaacttgacaacagcaaaaacactatcgtgtgcgtgggccaacttgcataatcctgcgtagctaaaccattatcagtgagcatggagctggcaagaaaaaacgaatgaataaaacttccatgcaagtcatacatacctatatgccagacctggaaagaggtaacaatgatcacccctaaggctattaacagaaagaaacgaagttcaatatctctgattaaaggttttatcgttttcctgctaataacaatataccaaagagtgaagttgaaagccgatagcagggaaaaagaaccagccaccagctcaaccaaatagttattaaaatatccgatactctcgctatgagttgagaaaccaccaagcgaaactgtggaaatcccgtgacaaatagcatcaaacaaaggcattcctgcaagtctataacagacaatacaagcaatacctaataaagaataagttatccacagtgtccgtgacgtatcggccaggcggggagtgagtttgtcatccttaaatggccccggcatttctgactgataaagctttgcaccaccaatacccaataatggcaatacagcaaccgccagaacaataactcctaaaccacctataaaatttaactgtgaccgatagtacaaatatgcccgaggtaatgaactaacatcatcaattacagttgctcctgttgttgttattccagaaaccccttcaaacagagcatcaatgaacgttaaattaagttctgagtcaatccataaagggaatgcactaataacagaaaacaaaatccaaaacattacaattataataaacccatcacgggtacgtaattgaatgccagatttcttagttgtataccacgctccgccaccaatgcaaaaaaatataacgaaagttataaagaaaacgaacaggcttttttctttataaaacaatgctacaaccattggtggcaacattgaaagactatagagccaaaccaggaacccacacatatgagtaacaactcttacatgagatgtattcatatctaaatattctttcaattataaccaccttgctgcaatattatgattatactgtataaaatttaactcctcttagatcttacttcactgttccttatgaaacaatcatcaaaatgaatcatattgtagttaagattttactttaaacactgctcggttatgtattgctgagcaccttcaagttgggcctgcatcattaccagtcgttcccggagggtgaaataatcccgttcagcggtgtctgccagtcggggggaggctgcattatccacgccggaggcggtggtggcttcacgcactgactgacagactgctttgatgtgcaaccgacgacgaccagcggcaacatcatcacgcagaacatcattttcagctttcgcatcagctaactccttcgtgtattttgcatcgagcgcagcaacatcacgctgacgcatctgcatgtcagtaattgccgcgttcgccagcttcagttctctggcatttttgtcgcgctgttctttgtaggcgatggcgttatcacggtaatgattaacaccccatgacaggcagacgacgatgcagataaccagagcggagataatcgcggttactctgttcattgctgaccccacaaacagatttcacgctcaatctcacgacgagtcatgagacctttccattgcttaccgccagcatatgtccagcgacgtagctgatcacatgcgcctttgatatcgccctggtttattttgcgaagaagcgtcgatgttctgaaattgccagcacccacgttgtaaacgaatgagtaaagagcgccgcgcgttgtttccggtatatcgactttgatgtacgggttaatttgtctggcgaccgtggcaaggtctttattcaggagggctttgcattctgctttggtatacgttttaccgagcatgatgtcttttcctgtatgcccgtgacatacagtccatacaccaacaatatctttgtatggtatgtagctgacaccttccagaccatcgttaccacttgggccagtgattaacactgatgctatagcaattgctccgccaccaatagcagcagcaacgacttttcgtaatgatggaggcattattcacctctcgcagccttgcgcttatcttctttaatcttgaaataaaggtttgtcaggtacgtcagcaggccaaataccagactacccagcacaccgattgcagcccactgtgacggagttactctatcgagcaactgtaaaaaccagtagccagcactgcctgcggaggtgccgtaggcaatgcctgttgaaattttgtccatggatttcatagcctcacctccgcacggaacggatggcatagttattatgtgtaggctttcagacacatcaatcagagccttattgatatatatgctggagacgatgcaatataaaaagctcgccgtagcgagctaataaaatgtatttctctgatattatgtttatttgtattagctcagacttgacatcacaggtttcgtatatagaacatcatcaaatctgtcagtttgctatgaatgagatatagtaattgaagagctaacctcgcatgtcaaagccagatttctgaaaatctctgtagacttccggattgttgaaggccggaaatttggctttatgagctgcggactttatcgcttcgcaataggctttatcaccgttactggtagatatttttaacgccgtgccatcctgagagaattccatatgcaacctgcattttttccctttccagttatgcggctcatcaagtttggcattaattgcagctctgattccccgcgcttgcgccccccattcatcctgatcatcccagcgtcctgaactgcaactacctgtagcagtagttttgtggcaatctgaagggtgtaaaggtgtgcatcccgcaacaaaaccgacccaaaaagtcaacataacgattttctttaatcccacttcttgctcctcaatccattaaaatctcagcaatagtagttgttacgtccgccactggctcagagctgactatccgctaaatttagctcagtgccgtagctgtgtcagaacaaacctaagccgaaaccgtttattacaaaacaataaatatcagggtttaaaatccagcaccccattttgaaatactttatatacatccggcgaagggggggcaggtatatcagcattctttatcgcattcatcgcttcacgacataaatcgaggtctccactttctcttttaacctccagtagaaggccattcggggccatatgcattctcagtgtacactcttttcctgaatacttactcgcatccccgaactgtttttcgatggcgctcttgatttgatgggcatacagacggatatcctcactaacatcagaagtacgttcagatgaactcacatactgtgtctctattgctttatcggagtaatatgatgtacggtcatgataatttgtcgatacagcatcagtgcacccgataataatcccactaataatcaacgtaagaattgatgcgctacgaaaacccatttttcctcacatatgtcatatagtaaaggattatatataccgttgttttggacgctcaaacagcgaatcagatcaaataaaacgcacatttgttaacatttacacaaagtctgcgtgggatattctgaaagaatatccataatgtggagagaatctattgaagtgcatggtgccgggtgcctcccggtgaacaaaatgttcgtgatacctgtcggcgacagaaaaggttaatggtatcaccccaccgcacagggggattcaccatgcaggagttttcttagcaaactcactgcgcgcccggcaactcccaaccacataaaatgcggagtttgtggtatttatgcatataactcgcaggaattatcttaaaaaactgatgtcgatccggattaaaaagaagcaggtcatcatcagatgactggaaaaaaggaaaacaaaaaatactcatcatacagttttgattgcagggatgagcctgctatgcacaatatgcagaatataagcaagataaaaatatgcaggcatattatttcggattttgttattaacacaacctttttaataatcatttggcatacaataaaccagcccaaaaagaaccgcctaaacaggcggttggtcaatacaaaggatgcttcgtctttattatagtaatctgaggcgtcgggtgtcttgtatcagacaacatattgtcccgctaaacagcgaattacaaaccaccctgcaatgatctctcatctcattttatatgagttgacgacatcaggataacgcatcatcagcccctgccaagaaatatcaaaactcccgccagcaatgtgttatcacaatattgtaaaaaaaacacagcaccgaaactataactggtctctgttataatttggagcagaaagaccagttgcccaactagcagcattctcccctgctttcctgacgtaaaaaaaccgcattaagcggtttttttacgatgtccatgtctgcaatccgcctcgcgatacagctttgcgaagcatagcaaaattgaagcagtttatacgtaagaaatcaagccattttctcagcaaatgattcacgcatgggaatatatagggcatactcagcaacagctaaccaattagcaatccgtttttcgcatgtgctaaaacaccactctgggtgtgcatcatttagcaattcagccattttgcgcttagtcatcccccgcccttcatagcgttgccggagaatgcaaatcaatcctggatgctctgccagcacctcacttatgactcgatcaatacataacgcctctgcatcagtacaatgcgccagccagctcttttgcttgccgttgatcatctctcgcaaaaacgcttccagctcagctttctctattcccgcttttttcattctgcgcagggcttcattaatggctgttttcgtcagttttttggatgccaacaactgattgaacatattccctgacctgccaccgccaatatacgaccagcgcccccacatacgtagttttccctgaatccagacactttccagcgtggtgaggcgaaggtgttctccgctttttcctgtattcgttgggtaaatcataaatgacctttctttctccagatttcttgtgtgcgaaaaaccccttcagcatgcatcaggcgcaattcttctttggtgtaatcgctggtttttacccgcccgtcgattagatcgtggcatgagctacaggctatcgccgcctgcatatcgtgtggttttgtcgctgttccgcacgtccccgccagcctgtaatgcgccagcacagaggtttcgggattgtgattgcagtagccagggattctgatctggcacatctggcctttagccgctttacgtaaattcaccattacgcaaactccagtagttgtgcggccacattttcaacttcctcctgagaggagaatttacggaacagaatccagttccacagcacattcagtacagatttataaacctgctgaaactcgacttcgtccatattcgcaaaagcgatggattttgcccgacgcccacggctaccgtccggataaatatgctcggtgtaaaatccggcctgaatggttacccactcgcggaaagcctcaaacgactttagcaacgccgtatcccgggttctacgagtcgcaacggtgttaaggtattgctctgcggcatcactcagggctggcgtgtgttcccgaccaactgattcgcacaggtaatcaacgaaaccagacagcagttctcgttcgcgaggcgtgatcgccccaccgaccggagtccagtaatcgaatcccagttgcaggagtttgaaaaaacgcttgtggaatgcgtagttacgcacacgcttaaagtctgcgtgtatccactcacctattttgatttgatgcagaaaatcgcaactctccggcgtcgccgggagaagtaaaccagaagaagtttgtttgaccagttgtatatgcgccatttctcaatctctcgatggcgcagtgcagcagatgccagttgttcaggctgacgtataaagtataaataaactggttccagtgtaaagcccccaccttaatggaataaaaaccaaacaacagattgctgggatacaaacaacgcttattattaaaagcggttaaacaaattaaattttaatgttatgcaaatttgtcagttcaccataatatctcatttgaaaaccgctgaaataacagccctatcagggttaatcatattaaggtgagtaaatatggaaaacaacaaatctgtacattacgttccttttttatctgtaatactttttgttttatgctgtgcgtgggcattatttttataaaaatatttacagatgaagtaaacccgccaatcaggttaactgtggctgcgttgaggatgcataatacatcagaggttgcggggatttctcccataagcgctaacttaagggttgtggtattacgcctgatatgatttaacgtgcaatccgtatcttcgagtgcccacacagattgtctgataaattgttaaagagcagttgcgacgcgctttagcgcactgtcgcgaggtggcgtatattacgctttcctctttcagagtcaaccctgaatttcaggatttttctcttcaaccgaaccggctgtttgtgtgaagtgattcacatccgccgtgtcgatggaggcgcattatagggagttctccgcaggccgcaatagaaaaattgcagaaaaatgactgactgctgcattccccagcaaaagcccgctttatacctttttacgcacagagttatccacaatcatcaatgtaatttctgtattttgcccacggtaaccacagtcaaaattgtgatcaccattgaaagagaaaaattcgcgagcgttgcgcaaacgttttcgttacaatgcgggcgaaaaataaggatgccccgttaggggcgttagctgagtttttcgcgaaaaattcagctaacgctctctgtaatagtcaaatccaggggatttaccatgcaacaacgtcgtccagtccgccgcgctctgctcagtgtttctgacaaagccggtatcgtcgaattcgcccaggcactttccgcacgcggtgtggagctgctgtctacagggggcactgcccgtctgttagcagaaaaaggtctgccggtaaccgaagtttccgattacaccggtttcccggagatgatggatggacgcgtgaagaccctgcatccgaaagtacatggtggcattctgggccgtcgcggccaggacgatgccattatggaagaacatcagatccagcctatcgatatggtggttgttaacctgtatccgttcgcccagaccgtggcccgtgaaggttgctcgctggaagatgcggttgagaacatcgatatcggcggcccaacgatggtgcgctccgccgccaagaaccataaagatgtcgcaatcgtggtgaagagcagcgactatgacgccattattaaagagatggatgacaacgaaggatcgctgacgcttgcaacccgtttcgacctcgccatcaaagccttcgaacacactgccgcctacgacagcatgattgccaactacttcggcagcatggttccggcttaccacggtgaaagcaaagaagccgccggtcgcttcccacgcacgctgaacctgaacttcattaagaagctggatatgcgttacggcgagaacagccaccagcaggctgccttctatatagaagagaatgtgaaagaagcctccgttgctaccgcaacccaggttcagggtaaagccctctcttataacaacatcgccgataccgatgcggcgctggagtgcgtgaaagagttcgccgagccggcatgtgtgattgtgaagcacgccaacccttgcggcgtggctatcggcaattccattcttgatgcttacgatcgcgcgtacaaaaccgacccaacctccgcattcggcggcatcattgcctttaaccgcgagctggatgcggaaaccgcacaggccatcatttctcgtcagtttgtcgaagtgattattgcgccgtccgccagcgaagaagccctgaaaatcaccgccgccaaacagaacgtacgcgttctgacctgcggtcagtggggcgagcgtgttccgggcctcgatttcaaacgcgtgaacggcggtctgctggttcaggatcgtgacctggggatggtcggtgcggaagaactgcgcgtggtgaccaaacgtcagccgagcgaacaggaactgcgtgatgcgctgttctgctggaaggtggcgaagtttgtgaaatccaacgctatcgtctatgccaaaaacaatatgactatcggcattggcgcgggccagatgagccgcgtgtactccgcaaaaatcgccggtattaaagcggccgatgaaggcctggaagtgaaaggttcctcgatggcttctgacgcgttcttcccgttccgcgacggtattgatgccgccgccgctgcgggcgtgacctgcgtaatccagcctggcggttctatccgtgatgacgaagtgattgccgccgccgacgagcacggtattgcgatgctcttcaccgacatgcgccacttccgccattaatggagcaatagatgaaagtattagtgattggtaacggcgggcgcgagcacgcgctggcctggaaagcggcccagtcgccgctggttgagactgtttttgttgctccgggtaatgcaggcactgcactggaacccgcgctgcaaaacgttgctattggcgtgaccgatatcccggcgctgttggatttcgcacaaaacgaaaagattgatctgaccatcgtcggcccggaagcgccgctggtgaaaggcgtggtcgataccttccgcgccgccgggctgaaaatcttcggcccaaccgcaggtgcggcccaactggaaggctcaaaagcgtttaccaaagatttcctggcccgccataagatccctacggcggaataccagaacttcaccgaggtagaacctgcgctggcgtatctgcgtgagaaaggcgcgccaatcgtcattaaagcggacggtctggctgccgggaaaggcgttatcgtggcgatgacgctggaagaagcggaagcggctgttcacgatatgctggcgggcaacgcttttggcgacgcgggtcatcgcatcgttatcgaagagttcctcgatggcgaagaagcgagctttatcgtgatggtggacggcgagcatgtgctgccgatggctaccagccaggatcacaaacgcgtaggcgataaagataccggaccaaacaccggcgggatgggagcttactcccccgcgccggtagtaaccgatgacgttcatcagcgcaccatggaacgtattatctggccaaccgtgaaaggcatggcggcggaaggcaacacctacaccggttttctctacgcgggcctgatgatcgacaaacagggcaatccgaaggttattgaatttaactgccgctttggcgatccggaaacccagccgattatgctgcgcatgaagtccgatctggttgagctctgcctggcggcctgtgaaagcaaactggacgagaaaacgtccgagtgggatgaacgcgcttctctcggcgtggtgatggctgcgggtggatatccgggtgattaccgcaccggtgacgtgatccacggcctgccgctggaagaagtggcaggcggcaaagtgttccacgcgggcacaaaactggcggatgacgagcaggtagtgaccaacggcgggcgcgtactgtgcgtcaccgcgctgggtcataccgtggcagaagcgcagaaacgcgcctatgccttaatgaccgatatccactgggacgactgcttctgccggaaagatatcggctggcgcgctatcgaacgcgagcagaactaacgcgacagttttgccaatagcgttttgcgcgtgatccctaactgacgggcggcttcggttttgttgccgcccgttttctccagcgccgccagaatcacctctttttccacttccaccaacggctgaatatcctgactttgtcccagcgggatcggcgtactggcaatcgccagcggcagctcgcgttcggaaatatattccccggtcagcagcaccactgcccgttccaccgcgttttccagctcacgaatatttcccggccagtcgtaatgaatcaacagatccatcgcctggggcgtaaaaccttttaccgccttgcgattacgctcggcaaagcgctgcagaaaatggccagccagcagagggatatcttcccgccgttgccgcagcgatggtacttcaatcgccaccacattcaggcgatagtagagatcctggcgaaaacgcccggcattcacctctgcggcaagatcgcgatgggtcgccgcaatcagccggacatcaaccgagataatctggttgctaccgacacgctgaacttcgcgctcctgaatcgcacgcagcagacgcacctgcatcatcggcgagatatcgccaatttcatcgagaaacagcgtgccgccgtccgcctcaacaaagcgcccttcccggcgtttatcggctccagtaaacgcccctttttcgtgaccgaacaattcagattccagcaaggattcgttgagtgccgcacagttgagcgttaccagcggtttttcgctacgtgcgctactggcgtgaatcgccctggcgaccagctctttaccggtgccggaatcgccgtggatcagtaccgtggcttccgatggcgcgacgagggcgatttcactgagcaggtgttgcatcgccgggcttttaccgaccataccgaactggctggcagtcaccgcaggtgtttcagcatcaatactgtgcgtatgcgcgagcgctttttccagcgtcgcctgtaggttatcgaaatccagcggcttgatgagataatccagcgccccagttttcagtgcctctaccgccgtctcgacgctggagtacgcagtcataatcagcaccggaattgccgggtttaacgctttgatctctttcagcgtggcgatgccgtccatctccgccattcgcacatcgcaaagcacaagatcaaaaacctgttcccgcacctgctccaacgcctgtcgcccgctgttcgccagcgcgacgttatagccccagccgcgcagtaaagcctgcaaaatagtgcagtggctaatgtcatcatccaccaccagaatatcgatattatcgtgcgtcatccttgtgggtccttacgcgtaatattgaccggaagccagagggtgaacgttgagccttttccctcctggcttgcgacctgaattgtaccaccgtgttgttcaacaatattatgcacgaccgccagccccaatccggtgccttcggctttagtggtgaagtacggagtgaagatggcatcaagctgatctgccgcaattcccttaccgctgtcggtaacgctgattttcacgcccgcgccgctttcgctggccgtcacgctaatcacgccatgctgaccaatcgcctgaatagcattgagatagagattcaacaggacctgagtcagcctgtccgggtcggcctgaatttccggtaatgtgtcgttggcggtaaagcgtaactggatctcccggctgtttgcatcctgacttaccagctgtaatgagtggttaatcagcgtgttgagatccaccgcctgcaaagccagatgcgttggcttaaccagttccagcaactcgcttaccacgcggtttaaacggtcggcctctttcgccatcacctgcgccagttgatgcgcttctccccctgcaggcgcgcgctcggcaaagtatttcgccagtcctttaatcgaggaaagtgggttacggatttcgtgggcaacgcctgccgcaagatgccccagcgccaccagcttctctttgcgcttcatttcatcttgtagaagctggcgcgagcgcagatagcggcgataccagaagaatgacaatacgcttgccagcaagaccgtcgccagggcgaagaggataatcagggtattgcgcttttccccactctgggttgcaaccagatcactggcatcaacggcgataaaaatagcctgttgtgcatctacttgtggcacagctttgccgttacagcgcggcatattgtgcattccatgccgccagggcgctgacattggctggaacaaacgatagacctcaagtgcaggcgtagtttccgttttcccaagcagccgccagcgggagttttcctctggctttaatttctgcatttcatccggcgaatagagcgcacgcccgaccttatcggggtcgctatgaagaataatgatgccctgcgcatcggtgactgcgaaccacaacactcccggctgtcccgccatctcttccagaagcgcctgttgctgtacatggtgcattcgcatccccatccctacgcggcttcccgactccagagcgcggataagcacattacctttttccagtaatgcctggcggtctgcctcgcttgcccgcccataatcacgaatcacagttaccgcaaacaatcccaccagcccaacaatgaccacggggaggatcgcgcttaaccatttagctaaggagtctttagaacgttgcataaaacgcatcttcttctttgcctgctcatccctttctgacagcagaaatcatgccatcttttatcagcgcttaccctgcgctgtaacacaaaggcttaagtttcaatgagtaaaaatgactcgctacccgcagcaggcgagtcatttttactcgtttatcatgccagattacccgtcatatcagcgtttcatcgttggcacggaagatgcaatacccgaagtaagacaaccactggaggattaaccatgaaacggaacacgaaaattgccctggtaatgatggcgctttcagcaatggcgatgggatcgacatctgcatttgctcacggcggacacggtatgtggcagcaaaatgccgcgcctttgaccagcgaacaacagacagcgtggcagaaaatccataatgacttttacgctcaaagcagcgcactgcaacagcaactggtgacgaagcgttatgaatacaatgccctgttagccgcgaacccaccggatagcagcaaaattaacgcggtcgccaaagagatggagaatttgcgtcagtcgttagatgagttacgggtgaaacgagatatcgcgatggctgaagcgggtattccgcgcggagccggaatgggcatgggctacggcggctgcggtggtggcggtcatatgggtatgggccactggtaaatcagaacgttttctcgttgggttgccagcgacagaaatcagagtttgccactaacagtaattgcgaaccttcgggcgcttccagccatgccacgctgacatcaacagaagagcggctctggcggcgctcgatatgcgctatcgcctgcgaatctaaatcaggtttaatggtttgcccttcgcaggtggtcacggtctgttccatcgcatgccagcgcccctggcgcagcacgactctcccctgacgtaaggcatcgctaatctggcggatctgatcagcacgataacggtataaatcgatttggtcgttagaaagctgctgcttttccccatcggattcacgttgcataaagctcagatcaccgcgatcgtcaaaacgcgcgcgaatattcaccggcggtttgctgtaaacattgatattgatgagcgtgaggttatcgccctgccagcgatactctcgcgtcgtggtatcgccactgcgccacgggctaaacacggcaagcagatgcacattatcgccgctgtcttttcgccagatgcgtaccgcgccctggtcttcagcaaatccactggcggtaaagggaggaagtgaagagttatgactacaggcagtgagaagcagagcgccagccagcatcaatgatcgacgccagaaagacaaaaggggtgaaaccaccccttcgttaaaactgttcactgccacgcaatcttacttaactgcgtctttcagtgccttgccagaaacaaatgccggtacgttagctgcggcaattttgatttctttaccggtctgcgggttgcggccagtacgctcagcgcggtggttcactttgaaggtaccgaaaccaaccagttgtacagcatcgccttctttcagagactcagtaattgcagccagagtggactccagagcagctttagcctgggttttggacagttctgctttctctgcaattacatcaatcagttgagtcttgttcataagttatccttacaatgtgtttatcgcttgctaagcatcgagtgcgacggaaatgccagaatagcactctcctgcatacacgcaccgatagccactttttttcgccccccaaatgtagaccagacggggggcgaaagggaagactccaggtacgacaaatcaggcgttaaatcacgttttctggtcttattgctgaaaaattataccaatattgctctcacccgcctcacgcaggtctgccctaaggccttttatcagctcgatatcgcgttcttcgcactcagctaaaagtcggaatatttcccactgaatgtcccattcttgctctacagctgggttttctttaagctcttcatcgctcatttcgcgaccagcctgagtcatttccagcatcgcaacggtcgtgatggaggtcttactcacttccaccgcgtgttcgagcgtttcaccactcaaacgcgaatggaccagttcacttaacgccacgcaggcatcgattgccggataaacgccgtacagatcgaaatcgtcggctgaaggaatcgcttcttcaaatttctccagttggctgtcgaaatttacttttgcgtctttaacggtcagcgtttcccagatgagatcgagaatgcgacggtaaatttgcccatcaccaaaaccggtttgctggcagaacatggcgtaattggggtacatgcgttcgcataagcaagccatgaaagtgacatgctgccagctttccaggcgctccagacgcagatgaattgggttttgtaacatgttgagttctcaaatacggaaattatccgcagtttacctgaattagggctgatttgctgtatagcgcacgaacgccggacgttccgaggccaccgcgtccgcccagcgcgttggctccggcagacgatagcctttcatgcagcgttgtacccacgccagcgcgctgtccacgctgacccgatggccggtagcgataaacaacgggttacagcgcgctttgctgcgccagacccaggccagctgctcgcctttatccatcagtggggccagcgcgcccggttcgctggagagcggttcgaatttaccgcagagccgttttttcgccacgccaatggtcggcacatccaccaataagccaaaatggctggcgacgccaagacggcgaggatgcgagatcccatgaccatcgacaaacactaaatccggcttttgcgacagcatctcccacgctgccagcagcgcaggatattcgcggaaggaaagaaaacctggaatgtaaggcatggtggtggcgatgcgggcaactttatactcgaccagctcaagcgagggatatttcagcagcaccatcgccgctcgcgtcacttctccgccctgctcaaacccgacatcggctccggcgatcagatccggtggatctttatcgagtcgatcctcgcggatcacagaagaagccagttcgatttgttgagcgcgtaatgacgcgagatccataatcactccttagcggtgatactgttcagacagtcgatgcactgcctccacgaacacgccagcatgttctggcggcacatcctgatgaatgccgtgaccaaggttaaagacatgaccttcgccgtgaccgaaacctgcaagtatagtcgctacttcttcttcaatgcgggcaggcggcgcgtacagcatcgacggatccatattaccctgcaacgcgactttattgcccacacggcggcgcgcatcggcgatgtccgttgtccagtcgaggcccagcgcatcgcaaccggtttctgccatggcttccagccactgtccgccgcctttggtaaacagcgtgaccggtacgcggcgaccgtcgttttcacgcagtaaaccatcaacaattttatgcatgtaatagagcgagaactgttgataatcgcgcccggtaagcacaccgccccaggtgtcgaaaatcatcactgcctgagcaccggctttaatctgcgcattcagatacaaagtgacgcttttcgccagtttatcgagtagagcgtgcagcgcctgcggatcggcatacatcatttttttgatcacggtgaacgctttgctgctgccgccttccaccatgtaggtcgccagcgtccacgggctgccggaaaaaccaatcagcggcacttcgcctttcagttcgcgacgaatggtacgcaccgcgttcatcacgtaacccagctcatcttccgggtccggaattggcagtttatcgacgtcggctttgcaggtgactggcgaggtaaaacgcggaccttctccggcttcaaaatagagccctaaccccatcgcgtccggcacggtgaggatatcggaaaagaggatcgccgcatccagtgggtagcgacgcagcggttgcaaagtcacttcgcacgccagctcggcgtttttgcacagcgacataaaatcgcccgcctgggcgcgcgtggctttatattccggtagatagcgacccgcctggcgcatcatccatactggagtgacatcaacgggctggcgcagcagcgcccgcagataacgatcgtttttaagttcggtcattttggctgttccttagtgcgtcaggcggtcagtgtatcatcactcatactctgcccgacacatcgccacagtatcttctatcagacggcgcgctacggtgccgggcggcgggagtaacggcaaatcgtcatagcgataccagttcgcctcaagcaattctttcgggtcgatcacgatgtcgccgctgtcatattccgccataaacgcggtcattaaagactgaggaaacggccacggctgggaagtcacataacgcaagtttttaactttaattccgctctcttccatcacttcccgcgcgaccgcctgctcgagggtttcgcccacttcgacgaatccggcaagtaccgtatggacaccgttacgatggcgggtatgctgggcgaggaggatcgaatcatcgcgacggatggcaacaataatgcagggggcgatttgcgggtagtaacgctcacggcaatggctgcacagcatcgcccattcggttttgctcggatacatttcatgcccgcagtaaccacagtatttatgcgatcggtaaaactccgccagttgtacgcctcgtccggccagttgaaacagcccaacatcgagatcaatgacctgacgtaccgaccccatatcgtgacgccgctgctgttgtactaaccaaacaggttccccctgccattcgccgatttgtagtgcgcgctgacccacaagatcgaaatttgccgcttcgccatatggcaattctcccttcggcaaccataatttttgttcatggctgacgacccaccagccgtgatctaatttttcaattatacgatccatagctcttgcactacctttgcatcactggcatgtttaacatggtttttacatttctcactgagcagtttttgaatacaaacttgcggagtcaatcatgcttaaccagctcgataacctgacggagcgcgtcagaggaagtaacaaactggttgatcgctggctacatgtacgtaagcatctgctcgtggcttactacaatctggttggcattaagcctggcaaagaatcgtacatgaggctaaacgaaaaagcccttgatgatttttgtcagagcctggtcgattacttgtctgccggacatttcagtatttatgagcgcattcttcataagctggaaggcaacgggcaactcgcgcgcgccgcgaagatttggccgcaactcgaagccaatacccaacagattatggattactacgattccagcctggaaaccgccatcgatcatgataattaccttgagtttcaacaggttttatctgacatcggcgaggcgctggaagcgcgctttgtgctggaagataagctgattctgctggtgcttgacgccgcccgcgtcaaacatcctgcttgagttctgcgctgttaacgcgtaatttacattcaacgccccgtttgtgggggctaatttcttgtcggagtgccttaactggctgagaccgtttattcgggatccgcggaacctgatcaggctaatacctgcgaagggaacaagagttaatctgctatcgcatcgcctttgcggcgatcgtctcttgcttcatccgtcgtctgacaagccacgtccttaactttttggaatgagctatgtctgcaacaaaactgacccgccgcgaacaacgcgcccgggcccaacattttatcgacaccctggaaggcaccgcctttcccaactcaaaacgcatttatatcactggcacacaccccggcgtgcgcgtgccgatgcgtgagatccagcttagcccgacgctaattggcggtagcaaagaacagccgcagtacgaagaaaacgaagcgattccggtctacgacacctccggcccgtatggtgatccgcagattgccattaacgtgcagcaagggctggcaaaactacgccagccgtggatcgatgcgcgcggcgataccgaagaacttaccgtgcgcagttccgattacactaaagcgcggctggcagatgatggcctcgacgaactgcgttttagcggtgtactaacaccaaaacgcgccaaagcaggacgccgtgtcacccaactgcactacgcccgccagggcatcatcacgccggaaatggaattcatcgccatccgcgagaatatgggccgcgagcgcatccgtagcgaagttttacgccaccagcatccgggaatgagctttggcgcacgtctgccggaaaatatcactgcggaatttgtccgtgatgaagttgctgccggacgtgcgattatcccggccaacattaatcatccggaatcggagccgatgattattggtcgcaatttcctggtaaaagttaacgccaatatcggcaactcggcggtcacctcttccatcgaagaagaagtggaaaagctggtatggtccacgcgctggggagcggatacggtgatggatctctccaccggtcgctatattcacgaaacccgcgagtggattttgcgtaacagcccggtgccgatcggtacagtgccgatctaccaggcgctggagaaggttaacgggatcgccgaagatcttacctgggaagcgttccgcgacacgctgctggaacaggccgagcaaggtgtggattacttcactatccatgcgggcgtactgctgcgctatgtgccgatgaccgcgaaacgcctgaccggtatcgtctctcgcggcggttcgattatggcgaaatggtgcctctcccatcatcaggaaaatttcctctatcaacacttccgcgaaatttgtgaaatctgtgccgcttatgacgtttcgctgtcgctgggcgacggtctgcgccccggttctattcaggacgccaacgatgaagcgcagtttgccgagctgcatacgctgggcgaactgaccaaaattgcctgggaatatgacgtgcaggtgatgattgaaggcccaggccacgtgccgatgcagatgatccgccgcaatatgaccgaggagttagagcactgccacgaagcgccgttttacactctggggccgctaactaccgatattgcgccgggctatgaccacttcacgtcggggattggtgcggcgatgattggctggtttggctgcgcgatgctctgttacgtaacgccaaaagagcatctgggtctgcccaataaagaagatgttaagcaggggcttatcacctataagattgccgcccacgccgctgacctggcgaaagggcatccgggcgcgcaaattcgcgataacgccatgtcgaaagcccgcttcgaatttcgctgggaagaccagtttaatctggccctcgacccgtttaccgcccgcgcttatcacgatgaaaccctgccgcaagagtcaggtaaagtcgcccatttttgctccatgtgtgggccgaaattctgctcgatgaaaatcagccaggaagtgcgtgattacgccgccacgcaaactattgaaatgggaatggcggatatgtcggagaacttccgtgccagaggcggagaaatctacctgcgtaaggaggaagcgtgatgtatcagcctgattttcctcctgtaccttttcgtttaggactgtacccggtggtggacagcgtacagtggatcgaacgtctgttggatgcaggcgtacgtactctccagctacgcatcaaagatcggcgcgatgaagaggtggaagccgatgtcgtggcggcaattgcgctgggccgccgctataacgcgcgattgtttatcaacgattactggcggctggcgatcaagcatcaggcgtatggcgtccatttggggcaggaagatttgcaagccaccgatctcaatgccatccgcgcggcaggcctgcggctgggcgtttcgacacatgacgatatggaaatcgacgtcgcgctggcagcacgcccctcttatatcgcgctgggacatgtgttcccgacgcaaaccaaacagatgccttctgcaccgcaggggctggaacagctggcacggcatgttgagcgactggcggattatcccaccgtggcgattggcggtgtcagtctggcacgcgcgcctgcggtgatagcaacgggtgtcggcagtatcgccgtcgtcagcgccattactcaagccgcagactggcgtttggcaacggcacagttgctggaaattgcaggagttggcgatgaatgaccgtgattttatgcgttatagccgccaaatcctgctcgacgatatcgctcttgacgggcagcaaaaactgctcgacagccaggtgctgattatcggtctgggcgggctgggtacacctgctgcgctgtacctggcgggcgctggcgtcgggacgctggtactggcagatgacgacgatgtgcatttaagcaatctgcaacgacaaatcctctttaccactgaagatatcgatcgcccgaaatcgcaggtcagccaacagcgactgacacagttgaatcccgacattcaactgacagcattacaacaacggttaacgggtgaggcgttaaaagatgcggttgcacgggccgatgtggtgctcgactgtaccgacaatatggcgactcgccaggagattaatgccgcctgcgtggcactcaacacgccgcttatcaccgccagcgcggtcggatttggcggtcagttgatggtactgacgccgccctgggagcaggggtgttaccgctgcctgtggccagataaccaggagccagaacgcaactgccgcacggcgggcgtggttggcccggtggtcggggttatgggcactttgcaggcactggaagccattaagttattaagcggtatagagacacctgcgggagaactccgactgttcgacggtaaatcgagccagtggcgcagcctggcgttgcgccgcgccagtggttgcccggtatgcggaggaagcaatgcagatcctgtttaacgatcaagcgatgcagtgcgccgccgggcaaactgttcacgaactactggagcaactcgaccaacgacaagcgggcgcggctctggcgattaatcagcaaatcgtcccgcgtgagcagtgggcgcaacatatcgtgcaggatggcgaccagatcctgctttttcaggttattgcagggggttgaaatgttacgtattgcggacaaaacgtttgattcacatctgtttaccggcacagggaaattcgcttcttcacaactgatggtggaggcgatccgcgcttccggcagccagctggtgacactggcgatgaaacgtgtcgacttgcgccagcacaacgacgctatcctcgaaccgcttatcgcggcgggtgtgaccctgctgccaaatacatccggggcgaaaacagcggaagaagccattttcgccgcccatctggctcgtgaagcgttaggcacaaactggttaaaattagagattcaccctgacgcccgctggctgttgcccgatcccatcgaaaccctgaaagccgccgaaacgctggtacaacagggatttgtcgtgctgccttactgcggggccgatccggtattgtgtaaacgtctggaagaagtcggctgtgcagcggtgatgccgctcggcgcgccgattggctcgaatcagggactggaaacccgcgccatgctggagattattatccagcaggccacagtgccggtggttgtcgatgctggcatcggcgttcccagccatgccgcgcaggcgctggaaatgggggccgacgcggtgttagtgaatacggcgattgccgtcgcggacgatcccgtcaacatggcgaaggcatttcgtctggcggtagaagcaggcctactggcacgtcagtccggaccgggcagccgcagttattttgctcatgccaccagcccgctgaccggatttctggaggcatcggcatgaaaaccttcagcgatcgctggcgacaactggactgggacgacatccgcctgcgtatcaacggcaaaacggctgctgacgtagagcgggcgctaaatgcctcgcaactcacccgcgacgacatgatggcgctgttatcgcctgccgccagtggctatctggaacaactggcccaacgggcgcagcgtctgacccgtcagcgatttggcaacacagttagtttctacgtcccgctttatctttccaatctttgcgctaacgactgcacgtactgtggattttccatgagtaatcgcatcaagcgcaaaacgctggatgaagcggatattgccagggaaagtgccgctatacgggagatgggctttgaacatctgctgttagtcactggtgaacatcaggcgaaagtggggatggattactttcgtcgtcatctccctgcccttcgtgaacagttctcttcactacagatggaagtgcaaccgctggcggagacggaatacgccgagttaaagcaacttggtctggatggcgtgatggtttatcaggagacatatcacgaggcgacttatgcccgccatcatctgaaaggcaaaaaacaggacttcttctggcggctggaaacgccggatcggctggggcgtgcggggattgataagataggcctcggcgcgctaattggcctttccgacaactggcgcgttgacagctatatggttgccgaacatttgctatggctgcaacagcattactggcaaagccgttactctgtctcctttccgcgcctgcgcccgtgtactggcggcattgagcctgcgtcgattatggatgaacgccagttagtgcaaaccatctgcgccttccgactgcttgcaccggagattgaactgtcactctccacgcgggaatcaccgtggtttcgcgatcgcgttattccgctggcgatcaataacgtcagcgccttctcgaaaacgcagccaggtggctatgccgataatcaccccgagttggaacagttctcaccgcacgacgatcgcagaccggaagcggttgctgccgcgttaaccgctcagggtttgcagccggtatggaaagactgggacagctatctgggacgcgcctcgcaaagactatgagacggaatgtaagaacgtaaatttattccgagccgctacggaagatgaaaaacgcaaggttgttgaaagcgttgtgtttttttatggtagtgccgtcagcaggaatgttgtccagggcgaaaagcttcttcctcgtttcgccctgcctttcttaaaaattccgtaatgcaaagtctgaagccatcgcctgttgagcaatgaaagagatctgattgtaagagagtaaatactcaactatgatagagacgaaaataagaacacatgttctcatcttccaggatgcagcagactgaagaaattcagacatcccgcaacctgcgattatcgcaaggtcaaggcaaagtccggtaatggcgttctgaataccagagataattctctggcgaaacccaccttaaggtgggttttgttattttgagggctgaggaagctgcttatttctcaataagttgtaggcaatggtgaaaaatttcactgatttacctttctgtttttcagaaatgggataagcgctagttacatgcaaacggagttttttcttttccctgaaagccctgaacgcaacaaagtaaaatgccttatctcctccgtctaagtccacctcaatcacggcatagctaccatacccggcatgaataacgttgctttctggcagcgccaaaatagttctttttaagtgtgtgcgcgctaagttataacggtgctggcagaagggacgagattctttaggcgcgtggtacattaacgattgtttttcttcgttcgtctgatgttcataatcttttgtgaagcagtgaagagagtaggtaacccaaaagcgatactctaaaggctctttgccctcatgatgctgaacgtagacagcctgatgagcatcaagaaatgataaatcacgaatatcaccatccggatgtccaaaaggtcgccacttttccacttcctgtttcattctcgttccttaagaaagttacacaggaatagtatcgaatccttgccgagtttgactcaattagttcagtcagtttcaggatattagtcatctctacattgattatgagtattcagaaattccttaaatattctgacaaatgctctttccctaaactccccccataaaaaaacccgccgaagcgggtttttacgttatttgcggattaacgattactcgttatcagaaccgcccagacctgcgttcagcagttctgccaggctggcagatgcgtcttctgcagtcacctgcggtgcagccggagcttcacccgcagcacggcgacgcatacgatcctggtggtacgcgtaaccggtacctgccgggatcagacgacccacgataacgttctctttcaggccgcgcagttcgtcgcgtttgcccgcaacggctgcttcggtcagcacgcgagtggtctcctggaacgatgccgcggagatgaaggactcggttgccagagacgctttggtgatacccagcagatcgcgggagtaagttgcacccactttgccgttcgcttccagttcgcggtttgcgatcttgacgcgagagtattcaacctgttcgccttccaggaagtcggagctacccgcgttaacgatggtagctttacgcagcatctgacgaacgataacttcgatgtgtttatcgttaatcttaacgccctgcagacggtatacgtcctgtacttcgttaacgatgtaacgagtaacagcatgaacaccacgcagacgcagaatgtcgtgcggcgcttccggaccgtcggaaattacgtcaccacgttctacacgttcaccttcgaacacgttgagctgacgccatttcggaatcatctcttcgtacggatcgctaccgtctaccggggtgataaccagacgacgtttacctttggtttctttaccgaaggaaacgataccgctgatttcagccaggattgccggctctttcggacgacgtgcttcgaacaggtccgcaacgcgcggcagaccaccggtgatgtccttggtaccgccggattcctgcggaatacgcgccagggtgtcaccagagctgatctgtacgccatcttccagctgaacaatcgctttacccggcaggaagtactgcgctggcatatcggtacctgggatcagaacgtcgttaccctgagcatcaacgattttcagtgccggacgcagatctttaccacctgcggtacgttctgcggaatccagaaccaccagcgaagacagaccggtcagttcgtcggtctgacgcgtaatggtctggccgtcgatcatgtcagtaaagcgtacaaaaccgcttacttcggtgataaccggcatggtgtgcgggtcccagtttgcaacggtttcgccgccagcaacctgttcgccatcgcctttcgccagtaccgcaccgtaaggtactttgtagctttctttagtacgaccgaattcgtcgatcagtttcagttcagtattacgggaagtgataaccagtttaccgctggagttcacaaccgacttcacgttgctgagcttgatgctacctttgtttttcacttggatgctggattcagcagccgcacgagatgccgcaccaccgatgtggaacgtacgcatggtcagctgtgtacccggttcaccgatggactgtgccgcgataacaccgattgcttcacccttgttgatgatgtggccacgcgccaggtcacgaccgtagcagtgcgcacatacaccaaagtcggtgtcacaagatacaacagaacgtactttaaccgcgtcgacagagttctcttccagcaggtcacaccactgttcgtgcagcagcgtgttgcgcggaacgaggatatcagcagtacccggcttcagaacgtcttcagcagttacacgacccagtacgcgatcgcgcagcggctctttaacgtcaccaccctcgataaccggagtcatcatgataccttcatgggtaccacaatcgtcttcggtaaccaccaggtcctgcgccacgtcaaccagacgacgagtcaggtaaccggagttcgcagttttcagtgcggtatccgccagacctttacgagcaccgtgggtggagatgaagtactggagtacgttcagaccttcacggaagttcgcggtgattggcgtttcgatgatggagccatccggcttcgccatcagaccacgcataccagcaagctgacgaatctgtgccgcagaaccacgcgcaccggagtcggccatcatgtagatgctgttgaaggaaacctgcttctcttcctgaccgtcacggttaatcacggtttcagtttgcaggttatccatcatcgctttggatacacgatcgttcgccgcagcccagatatcgataactttgttgtagcgttcgcccgcagttaccagaccagactggaactgctcctgaatttcagcaacttctgcttctgcctcggagatgatttcgtgtttcttctccgggatgaccatgtcatcgataccaacagatgcaccagaacgcgctgcataggcgaagccggtgtacatgatctggtccgcaaaaataacggtcggtttcagaccgagaatgcggtagcaggtgttcagcattttggagattgcttttttacccagcgcctggttgacgatggagtaaggcagacctttcggtacaatcatccacagaatggcacggccaacagtcgtgtctttcaggctggttttcgctactaattcaccgttagcatctttttcatactcggtgatacgcactttaacgcgcgcatgcagagaagccagaccagagcgatacagacgttctgcttctttcgggccagtcagcaccatgccttcgcctttggcgttaacacagtcacgggtcatgtagtacagacccagtacaacgtcctgagacggaacgatgattggttcgccgttcgccggggacaggatgttgttggtagacatcatcagcgcacgcgcttccagctgggcttccagcgtcagcggtacgtgaacagccatctggtcaccatcgaagtcggcgttatatgccgcacaaaccagcgggtgcagctggatagctttaccttcgatcagtaccggttcaaatgcctggatacccagacggtgcagagtcggtgcacggttcagcagtaccgggtgttcgcggataacttcgtccaggatatcccaaacgacagcttcttcgcgctcaaccattttcttcgcagctttaatggtggtagcaagaccacgcagttccaacttgccgtagatgaacggtttgaacagctccagtgccattttcttcggcagaccgcactgatgcagacgcaggtatggacctacggtgattacagaacgaccggagtagtcaacacgcttaccgagcaggttctgacggaaacgaccctgtttacctttgatcatgtcggccaaagatttcagaggacgcttgttagaaccggtgatcgcacgaccgcgacgaccgttatccagcagggcgtctaccgcttcctgcagcatacgtttttcgttacgtacgatgatgtccggcgcagccagatccagcagacgtttcagacggttgttacggttaatgacgcgacgatacagatcgttcaggtcagaagtcgcgaaacgaccaccatccagcggaaccagcggacgcagatctggcggcagtaccggcagaacggtcaggatcatccactctggtttgttaccagactgaacgaacgcttccagcagtttgatacgcttggtcagctttttacgcttggtttcggagttggtttcgttcagctcttcacgcagctgttcgcactcttgctccagatccatgctcttcagcagagcctggattgcttccgcccccatcttcgcgtcgaattcgtcaccgaactcttccagcgcgtccagatactgctcttcagtcaggatctgctgacgttccaggttggtcataccgccttcgataaccacataggattcaaagtacagtacgcgttcgatatcgcgcagcggcatatcgagcagcagaccgatacgggacggcagcgatttcaggaaccagatgtgcgcagtcggggaagccagttcgatgtggcccatacgctcacggcgtactttagtctgggtcacttcaacgccgcacttctcacagatgacgccacggtgtttcaggcgcttgtacttaccgcacaggcactcgtaatcttttaccggcccaaagatacgggcgcagaaaaggccgtcacgttctggtttgaacgtacggtagttgatggtttccggctttttaacttcaccgaaagaccatgaacggatcatgtctggcgaagccagagcaattttgatcgcatcaaactcttcggttttagtctgcgctttcagaaactttaataaatctttcacggatttgctcccgtcggagttagcacaatccgctgccgggttttaacccgacagcagtgacctgtttgagcgagaattactcgtcttccagttcgatgttgatacccagcgaacgaatctctttcaacaatacgttgaaggattctggcatgcccggctccatctgatggttgccgtccacgatgtttttatacatcttggtacgaccgttcacgtcatcagacttaacggtgagcatttcctgcagggtgtatgctgcgccgtatgcttccagcgcccacacttccatctccccgaaacgctgaccaccgaactgtgccttaccacccagcggctgctgagtaaccaggctgtaagaaccggtggaacgcgcgtgcatcttgtcgtcgaccaggtggttcagtttcagcatgtacatgtaaccaacggttaccggacgctcgaactgttcaccagtgcgaccatcgtacaggcggatctgaccggaagtcggcaggtcgccaagtttcagcagctctttaatttctgcttctttcgcaccgtcgaacaccggcgttgcgattggcatacctttgcgcaggttttcagccagacgcataacttcttcatcgctgaaggtactcaggtcaactttctgacgaacgtcagcgcccagatcgtacgcacgctggatgaattcgcgcagtttcgcgacttcttgctgctgtttcagcatggcgttgatcttgtcgccgatacctttcgcagccatacccaggtgggtttcgaggatctgaccgatgttcatacgagacggtacgcccagcgggttcagtacgatgtctaccggcgtaccgttttcatcgtaaggcatatcttcgatcgggttgatcttagaaattacacccttgttaccgtgacgacctgccatcttgtcaccaggctggatacggcgtttaaccgccagatataccttaacaatcttcagcacgcccggtgccagatcgtcgccctgggtgattttgcggcgtttcgcttcgagtttcttctcgaactcgtgtttcagttcgtcatactgctcagccagctgttccagctgattttgtttctcttcgtctgtcaggcccagctccagccagcgatcgcgcggcagtttgtcgagcttctcagcttcaacgccaccggctaccagcacagcacggatacggctgaacagacccgcttcgaggatctgcagttcttcagacaggtctttcttcgcctgtttgagctgcatttcttcgatttccagcgcacgtttgtctttttctacgccatcgcgagtaaagacctgaacgtcgataaccgtaccggatacaccgtttggtacgcgcagagaagagtctttaacgtcagaggctttctcaccgaagatcgcacgcagcagtttttcttctggggtcagctgagtttcacctttcggcgttaccttaccaaccagaatgtcgccaccggtcacttccgcaccaatgtaaacgataccggattcatccagtttggagagcgcagcttcacccacgttcgggatgtcagcggtgatctcttccggacccagcttggtgtcacgggacacacacgccagttcctgaatgtggatggtggtgaaacggtcttcctgaacaacacgctcggatacgaggatggagtcttcgaagttgtaaccattccacggcatgaacgctacgcgcatgttctgaccaagcgccagttcaccgaggtcggtggacggaccgtctgccagcacgtcgccacgttcaaccggttcacccagagacacacacggcatctggttgatacaggtgttctggttagaacgggtgtatttggtcaggttgtagatgtcgatacctgcttcacccggatacatctcgtcttcgttaactttgataacgatacgggaagcatccacgtactgaacgacaccaccacgtttagctaccgcagttacaccggagtcaacggcaacagcacgttccataccagtaccaaccagcggcttatcagcgcgcagagtcggaacggcctgacgttgcatgttcgcacccatcaatgcacggttggcgtcatcgtgttctaggaacgggatcagggacgcaccgacggataccacctgctgggtggatacgtccatgtagtcaacctggtcgcggctgaacaagctggattcgcctttgctacggcaagttaccaggtcttctacgaagtggccttcttcatccaagttggagttcgcctgggcgataacgtagttgccttcttcgatagcagacaggtagtgaatttcgtcagttacaacaccgtcggtcactttacgatacggagtctcaaggaagccgtattcgttagtctgtgcgtacacggacagagagttgatcagaccgatgttcggaccttcaggggtttcgattggacatacgcgaccgtagtgagtcgggtgtacgtctcgaacttcgaagcctgcacgttcacgggtcagaccgcctgggccgagtgcggagatacgacgtttgtgcgtaatctcagacagcgggttgttctggtccataaactgagacagctggctggaaccgaagaactctttcactgctgcggaaatcggcttggcgttgatcatatcctgtggcatcagggtatccagatcgcccagagacagacgctctttcaccgcacgctctacacgtaccaggccaacgcggaactggttttccgccatttcgccaacggaacggatacgacggttgccgaggtggtcgatatcatcgacttcgcctttaccgttacggatatcgatgagctttttcataacatcaatgatgtcgtctttgctcaggataccggaaccttcgatttcttcgcgcagcagagaacggttgaacttcatacgaccaaccgcagacaagtcataacggtcttcggagaagaacaggttctcgaacaggctttcagctgcttcacgagtcggcggctcgccagggcgcatcatgcggtagatttctaccagtgcgctcagacggtcgttagttgggtcgacacgtaaggtttcagagatatatgggccgtgatccagatcgttggtgaacagcgtttcgatacgcttgtgaccagactggctcagcttagccagcagatccaggctcagctccatgttcgctgcgcagatcagctcgccggtagactcatcaatatagtctttagcaaccactttacctgcgatgtactcaaccgggacttcgatcagtttgacgtcgtctttttccagctggcgaatgtggcgcgcagtgatacggcggcctttttctacgtacactttaccgttagcttcgatgtcaaaagatgcggtttcaccacgcaggcgttccggcaccagttccatctgcagcttgttatcacggatttcaaagataactttttcaaagaacaggtcgaggatctgctctgtggtgtagttcagggcgcgcagaatgatggtcgcaggcagtttacggcgacggtcgatacgtacgaacaggttgtccttcggatcgaattcgaagtccagccaggaaccacggtaagggatgatacgcgcgttatacagcactttacccgaagagtgggttttacctttgtcggagtcaaagaagacgcccggactacggtgcagctgggaaacgataacacgctcagtaccgttgataacaaaggtaccgttgtctgtcatgagcggaatttcgcccatgtagacttcttgttctttaatgtcttttacggtgccttccggcgcttcgcgctcatagatcaccagacgcagtttaacgcgcagcggtgcggaataggtcacgccacggatttgacattcctggacgtcaaacaccggttcgccaaggcggtagctgacgtattgcagctcggaattaccgctgtagctctgaatcgggaatacggaacggaaagcagcttccagaccatactgcccttcaggatcttgctcgataaatttctgaaacgagtcaagctggatagaaaggagataaggtacatccagaacttgtggacgtttaccaaaatccttacgaatacgttttttctcggtataggagtaaaccatagggttcctcagctcgctgacaagtcgacccatctgtccattgagcggacagtttgtgcaacactattttgttgaccggaaaatggaacactttccgcaatgcctgttgctatcacgcttaaaccatttcattgcgatttacacagaacggacgtcctgtcgcagtatattaagtcgtcgatagaaacaagcattgaaaggcacagcagtagtcaaacagtgtgaaacgctactggcgccttacagcgcaaaaaggctggtgactaaaaagtcaccagccatcagcctgatttctcaggctgcaaccggaagggttggcttatttaacttcaacttcagcgccagcttcttccagagcttttttcagtgcttctgcgtcgtctttgctcacgccttctttcagagcagccggtgcagattctaccaggtctttagcttctttcagacccaggccagttgcgccacgtactgctttgataacagcaactttgttagcgccagcagctttcagaattacgtcgaattcagttttttcttcagcagcttcaaccgggccagcagctacagctacagcagcagcagcggaaacaccgaatttttcttccattgcagagatcagttctacaacgtccattacagacatagctgcaactgcttcaatgatttgatctttagtgatagacatttaaattgttcctgaatatcagaataagtttatacgtaagcgaatgcgttaaaaagataactgcgattaagcagcttctttcgcatcgcgtacagcagccagagtacgaaccagtttgccagccgaagcttctttcatggttgccatcaggcgtgcaattgcttcttcgtaggtcggcagagttgccaggcggtcgatctgagacgccgggatcagctcaccttcaaaggcagcggctttgacctcaaattttgcattcgctttcgcgaactctttgaacagacgagcagcagcgcccgggtgttccatagagtatgcaatcagggtcggaccaacaaacgcgtctttcaggcactcgaacggagtaccttcaacagcacggcgcagcagggtgttacgaacaacacgcatgtatacgccagcttcgcgacctgctttacgcagttcagtcattttatctacagttacgccacgggaatccgcaactactgcagacagcgcgcctttggctacttcgctgacttcagcaacaatcgcttgtttgtcttgaagatttaaagccattagctttgctcctggatgtttgccagagaaaatctctggaactcacttcactcctccaaacggagagagcgtcttaattacggtgagcagaaacaagccagaatataaaagaataatcttagcgttctgtcaccgtctacgcaggggattaagtttcttgcgaaactcctgcggtcttcgacggaggcctggataggccaggctccaacgaacaaatcttttctatccgtcgctattcagcttgtgacggcgttggcttccttcattcgcaccagtcacatagttagctatgctcctggcgactcactcagttgccgccttgccacaacccgaatatctcggatatacgtctgcattaagcattatacgtgggggtaagattgtagacaaaatcaccgcccacgtaaaggcattagtttacagaagcgctcaggccagcctggtcaactgcaacacctgcacccatggtggtggagatgctaactttcttgatgtacacgcctttcgcctgagtcggttttgcttttttcagcgcaaccagcagagcttccaggttttctttcagtttgtcagcgtcaaagtccactttaccgatggtggtgtggatgatgccgtttttgtcgttacggtaacgaacctggccagctttagcgtttttaaccgcttcagcaacgttcggtgttacagtacccactttcgggtttggcatcaggccgcgcggacccagaacctggcccagctggccaacaacgcgcattgcatccggagaagcaataacaacgtcaaagttcatttcgcctttcttgatctggtcagccagatcttccatacctaccagttctgcgcctgcagctttagcagcttcagcgtttgcaccttgggtaaatacggctacgcgaacggaacggccagtaccgtgcggcagtacagttgcaccacgtacgttctggtcagatttacgagcgtcgatgccgaggttaacagctacgtccacgctttctacgaatttagcagtcgccagctctttcagcagtgcgatagcttcgttgatgtcgtactgtttggttgcatcaactttctcgcggataacacgcatgcgcttggtcagtttagccatttcttagtcctccactaccaggcccatggaacgtgcagtaccttcgatggagcgagtcatcgcttcaatgtcggcaccagtcatgtcggcagctttggtctgcgcgatttcctgcagctgagcgcgggaaattttacccactttgtctttgttcggcttaccggaaccagacttgataccagccgcttttttcagcagaactgctgccggcggggtcttggtaacgaaagtgaaagaacggtcagcgtaaacggtgattactaccggaatcggcagacctttttcgatggaatcagtttttgcgttgaacgctttgcagaattccatgatgtttacgccctgctgacccagagccggacctactggcggactcgggttagccataccagctgcaacctgcagcttgacataggcttgtactttcttagccattataaattcctcaagttgggtaataacgcctctgagaggctccccgtgatataaaaaatcgttttacgggcaaggcccataaaaacaaaaggcgcgaaattgtattccaatctcacgccttgtgcaacgattaaatcgccgcttttttgatcgctgggttaggctttttcaacctggctgaagtccagctctaccggggtcgcacgaccgaagatagaaacagacactttcagacgagatttctcgtaatccacttcttcaacaacaccgttgaagtcagcgaacggaccatcattaacacggaccatttcacccggttcaaacagcgttttcggacgcggcttatcaccaacctgctgcaggcggttcataatcgcatcgacttctttatcgctgattggcgcaggacgatcggaagtaccgccgatgaagcccatcacacgcggtacgctgcgcaccaggtgccagctcgcgtcgttcatcaccatctgaacgaggacgtagccagggaagaatttacgttcgcttttgcgacgctgaccgccacggatttcaaccacttcttcggttggtaccatgacttcaccaaacaaatcttccatgttgtgtaatttgatatgctcacgcagcgacgttgctacgcggccttcaaaaccggaaaacgcctgaacgacgtaccagcgctttttaggagcttcagacatctcagaacctcaggccagtgataaaggataccaggcgaaccagaataccatccagtccccacaggatcagtgacattactgcggtaaccgcagccacaatcagcgtggtgtgcaatgtttcctggcgagtcggccaaatgaccttacggacttcggtacgcgcttcacgggcaaaagcaacggtagctttaccttttgtcgttaacagcgcgacaccacccgctgcagcaatcagaattactacggccagcgcacgcagcggcagcataatgtcgcgataaagatagttgccgacaatcgccaccaggagcaatgccaccacaacgacccacttcatcgcttccaggccgcgcccgcttccttgagcttcggtattcgcactcataaaccaacctgtcagaagttttctacaaacattttcaccccgcgatcgcgaggcaaaccaaatcgaaacgcgtattagcttttcggattatacgccctcaacagagcctgtctcagcaatgattatgacaaagaaaatcactgatgagccaggttctggtacgaaagcgtgcaaaaagggcatcaaatgatgcccttttagtgcgcattgcgtcaaatgttatcggcaattagctcagaacttttgctacaacgcccgcgccaacggtacggccgccttcacggattgcgaaacgcagaccgtgggagcgattcatgtcattagtgcgttctcaacaatgcacagtctggtcatcggacagatcaagacggataagaaatctaatgagattacagctatccctgaacttattaacatgctggatattaaaggaaaaatcatcacaaccgatgcgatgggttgccagaaagatattgcagagaagatacaaaaacagggatgtgattatttattcgcggtaaaaggaaaccaggggcggctaaataaagcctttgaggaaaaatttccgctgaaagaattaaataatccagagcatgacagttacgcaatgagtgaaaagagtcacggcagagaagaaatccgtcttcatattgtttgcgatgtccctgatgaacttattgatttcacgtttgaatggaaagggctaaagaaattatgcgtggcagtctcctttcggtccataatagcagaacaaaagaaagagccagaaatgacggtcagatattatatcagttctgttgatttaaccgcagagaagttcgccacagcaatccgaaaccactggcacgtggagaataagctgcactggcgtctggacgtggtaatgaatgaagacgactgcaaaataagaagaggaaatgcagcagaattattttcagggatacggcacatcgctattaatattttgacgaatgataaggtattcaaggcagggttaagacgtaagatgcaaaaagcagccatggagagaaactatctggcgtcagtccttgcggggaacgggctttcgtaatcttgccctgcctgctcacctcctccaggcacttccactacatgatgacctgctcggtgccaccgctccttttcactatgacgttaacctccccgtcccaggacaccatgcttttgtctacattctacgcaaacggcaacttttataaccagtgtaaaaataacgtgccgcaatagtcatacctattaatggtaaaaagctgtcacaattcataaaaaaccttaatatacgccaccctaaacataaccagcgttaatgtaaggtttttgtgtggactggcttcttgatgtttttgctacctggctctacggcttaaaagtaatcgcgataacgttagcggtcatcatgttcatcagcgggctggacgatttttttattgatgtcgtctactgggtacgccgcattaaacgcaagttgagtgtttatcgccgctacccgcgaatgagttaccgcgaactgtataaaccagatgaaaaaccgttagcgattatggttccggcatggaatgaaacgggcgtcatcggcaatatggccgagctggcggcgaccacgctcgactacgaaaactatcatatctttgttggcacctaccccaacgaccccgatactcagcgtgatgttgacgaagtgtgcgctcgcttcccgaatgtgcataaggtagtctgcgcgcgtcctggccccaccagcaaagccgactgtctgaacaacgtgctggacgccatcacccaatttgagcgtagcgccaatttcgcttttgctggttttattctgcatgacgccgaagatgtgatttcaccgatggaattgcgtctgttcaactatctggtcgagcgtaaagatctgattcagatcccggtgtatccgttcgaacgcgaatggacgcacttcaccagcatgacttacattgatgagttttcagagctgcatggcaaagatgttccggtgcgtgaagccctcgccggacaagtgcccagcgcaggcgtcggcacctgtttcagccgccgcgccgtgaccgcactgttagctgacggtgacggtattgctttcgacgtgcagagtcttactgaagattacgacattggcttccgcctgaaagaaaaaggtatgacggaaatttttgtccgttttccggtggtggacgaagccaaagaacgcgagcagcgtaaatttttacagcacgcgcggacatcaaacatgatctgcgtgcgcgaatatttccccgataccttttcgactgcggttcgacaaaaatcccgctggatcatcggcattgttttccaaggctttaaaacccataaatggacctccagcctgacgctgaactactttctctggcgcgaccgcaaaggggcaatcagtaactttgtcagcttcctcgcgatgctggtgatgatccagcttttgctgttgctggcgtatgaaagtttgtggcccgatgcctggcatttcctttctattttcagcggcagcgcatggttaatgaccctgctgtggctaaactttggtttgatggttaaccgcatcgtgcagcgggtgattttcgttactggctactacggcctgacgcaggggctgctttccgtcctgcgtcttttctggggcaacctgattaacttcatggccaactggcgcgcgctaaaacaggtacttcaacacggcgatccacgtcgcgtggcgtgggataaaacaacgcatgacttccccagcgtgactggcgatacccgctcgttgcgcccgttaggtcaaattctgctggaaaatcaggtcatcactgaagaacaactcgatacagcactgcgtaatcgcgtcgaaggtctacgcctgggcggttcaatgctgatgcaggggctgattagcgccgagcagctggcacaggcgctggcagagcaaaacggcgtggcgtgggaatccatcgatgcctggcagatcccttcctcgctgattgccgaaatgccggcctccgtggcgctgcattatgcggtactgccgctgcgtctggaaaatgacgagttaattgtcggcagtgaagatggtattgacccggtttcgctggcggccctgacgcgtaaagtcggacgcaaagtgcgttacgtcattgttctgcggggacaaattgtcacagggttacgtcactggtatgcacgccgacgcggtcacgatccgcgggcaatgttgtacaatgcggttcagcatcagtggctcacggaacagcaggccggtgaaatctggcggcaatatgtgccgcatcagttcctgttcgccgaaatactgaccacgctcggtcatattaatcgttcagcaattaacgtgttgttattgcgccatgaacgcagttctctgccgctcggcaagtttttggtcaccgaaggcgttatcagccaggaaacgttggatcgcgtcctgacaattcaacgcgaattacaagtttcgatgcaatcactattactcaaagcaggtttaaacacagaacaggttgcgcaactggagtccgaaaatgaaggagaataaccttaatcgcgtcatcggatggtctggtttactgctgacgtctttattgagtaccagcgcactcgcagacaatatcggcaccagcgcagaagagctgggtctgagcgattatcgccattttgttatttatccccgtctcgataaggcgctgaaggcacagaaaaataacgacgaagcaaccgccatccgcgaatttgaatatatacaccagcaggtgccggataatattccgctgactttataccttgcggaagcctatcgccattttggtcatgatgaccgggcgcggctgttgcttgaggatcaactgaaacgtcacccaggagatgcccgacttgagcgcagtctggcggctattccagttgaagtgaaaagcgttacgactgttgaagaactgcttgcccagcaaaaagcgtgcgatgctgcaccgaccctgcgttgtcgcagtgatgtcgggcagaatgccctgcggctggcacagttacctgtcgccagagcgcaactgaacgatgcgacgtttgctgcatcgccggaaggaaaaacgctgcgaaccgatctgctgcaacgggcaatctacctgaaacaatggtcccaggcagatacgctatacaatgaagcacgccagcagaacacattaagcgcggcagaacgccgtcagtggtttgacgtgcttcttgccgggcagctagacgatcggatcctggcactgcaatcacaggggatcttcaccgatcctcagtcatatattacttacgcgaccgcgctggcttatcgtggcgaaaaagcacgcctccagcattatctcaatgaaaataagccgctgtttaccacggacgcacaagagaaaagttggctctatctgttatctaaatacagcgccaaccccgttcaggcattggcgaattatacggtacagtttgccgacaaccgccagtatgttgttggcgcgacgctaccggtgctgttaaaagaaggtcagtacgacgcagcgcaaaaactgctcgccaccctccccgccaatgaaatgcttgaggagcgttatgctgtcagcgtggcgacccgtaacaaggctgaagctctgcgtctggcacgcttgctgtatcagcaagaaccggcaaatcttacccgcctggatcaactaacctggcaactgatgcagaacgagcagtcacgcgaagctgccgatttattgctgcaacgctatcctttccagggcgatgcgcgtgtcagccagactttaatggcgcgactggcgtctctgctggaaagtcatccttacctggcaacgccggcgaaggtggcgattttatcgaaacccttaccgctggcggagcaacgtcagtggcaaagtcagttgccgggtattgcagataattgcccggcaatagttcgcttgctgggcgatatgtcgccttcctacgatgccgccgcctggaaccgtctggcaaagtgttatcgggacacgctacccggtgtggcgttgtatgcatggcttcaggccgaacaacgacaaccgaacgcctggcaacatcgtgcggtagcctatcaggcgtatcaggttgaggactacgccaccgcactggcggcctggcagaaaatcagtcttcacgacatgagcaatgaggatctgcttgctgctgccaataccgcccaggcggcaggaaatggtgcggctcgcgatcgctggctacaacaggcagaaaaacgtggactgggaagcaatgcgctctactggtggctgcatgcgcaacgttacattcctggtcagccggaactcgcactgaacgatctcacgcgctcaatcaatattgcgccttctgccaacgcttacgttgcgcgggcgacaatttatcgccaacgtcataatgtcccggccgcggtgagtgatttgcgcgccgcgctggaactggaaccgaataatagcaacacccaggcagcgcttggttacgccttgtgggatagcggtgatatcgcacagtcgcgggaaatgctcgaacaggcgcataaagggctaccggacgatccggcactgatccgacaactggcctatgtgaaccagcgtctggatgacatgcctgcgacgcagcactacgcccggctggtgattgatgacattgataatcaggcgctgataaccccactgaccccagagcaaaatcagcaacgcttcaatttccgccgtttgcatgaggaggtcggtcgccgctggacgttcagtttcgattcttctatcggcttgcgttccggggcaatgagcaccgctaacaataatgtcggcggcgcagcgccagggaaaagctatcgtagctacgggcaactggaagccgagtaccgcatcggacgcaatatgctgctggaaggcgacctgctctcagtttatagccgcgtctttgccgataccggagaaaacggggtgatgatgccggtgaaaaatccgatgtccggcaccggtctacgctggaagccgctgcgcgatcagatctttttcctcgccgtcgaacagcagttgccgctgaacgggcaaaatggcgcatccgataccatgctgcgcgccagcgcctcattctttaatggcggcaaatacagcgacgaatggcacccgaacggttcaggctggtttgcccaaaacctgtacctcgatgcggcgcaatatatccgccaggatattcaggcgtggacggcagattatcgcgtcagctggcatcagaaggtagctaacggacagactattgagccttacgctcacgttcaggacaacggctatcgtgataaaggcactcagggcgcgcagcttggcggtgtcggggtccgctggaatatctggaccggcgagacgcactacgacgcctggccgcacaaagtcagtctcggcgtcgagtatcaacatacctttaaggcgattaatcaacgtaacggagagcgcaacaacgcgtttctcaccattggagtgcactggtaaatgcgtaagttcattttcgtattgctgacactgcttttggtcagccctttttcctttgcgatgaaaggtattatctggcaaccacaaaaccgtgatagtcaggttaccgatacccagtggcaggggctgatgagtcagttacgtttgcaaggcttcgataccctggttttgcaatggacccgttacggcgatgcattcacccagccagaacagcgcgcgttattgtttaagcgggccgcagctgcgcaacaggctggcctgaagctgattgtcgggctgaacgccgatccggaattttttatgcaccagaaacagtcgtccgcagcgctggaaagctatcttaatcgcctgctggctgccgatctccagcaagccagattatggagcgccgcgcctggcgtaacgccggatggctggtacatcagcgcggaaattgacgacctgaactggcgcagcgaagccgcccgtcagcctttgctaacatggttaaacaacgagcagcggctgattagcgatgtttcagcaaaaccggtttatatcagtagttttttcgccggaaacatgtcgcccgatggctatcgccaactgctggaacacgttaaagcaaccggcgttaatgtctgggtacaggatggcagcggcgtggataaacttaccgctgaacagcgtgaacgttatctacaggccagcgccgattgccaaagctccgccccagcaagcggcattgtttatgaactgtttgtcgccggcaaaggcaaaacctttacagcgaaaccgaaaccggacgcagaaattgcctcgctgttagcgaaacgttcctcttgcggtaaagacactctctatttctctctgcgctatttgcccgtcgcgcacggcattctcgagtattaaatctcctccaggtaagtcgggtacgacctggcttacctctttcgctctcgtcagaattccatcaagattaattgctaaaaagcgtgctaaagaaagaagatcgttatcggcgaacgggccgatcactcatgcaggaagcatagatcctttgagcggagtttctgatatctgaggagtgcgaaatgcaattgagcagcagtaaaccttgcgtggtgatcctgaccgaaaaagaggtagaggtaagcgtcaataaccatgctacgtttacccttccgaaaaactacctggccgccttcgcgtgcaacaataacgtcattgaactctcaacgttaaatcacgtattaatcacccacatcaaccgtaacatcatcaacgattatctgttgtttttaaataagaacttaacctgtgtaaagccctggtcgcggctggctaccccggttatcgcttgtcatagccgtacaccggaagtgttccggctagccgccaaccacagcaagcagcaacccagcaaaccctgcgaagcggagttgacgcgcgcattgctttttaccgtattgtctaactttcttgagcaatcgcggtttattgccctactgatgtatatcttacgcagcagcgtccgcgacagcgtctgccgcattattcaaagcgatattcagcactactggaatctgcgaattgtcgccagttcgctatgtttaagccccagcctgctcaaaaagaaattaaaaaacgaaaataccagctatagccagattgtcacagagtgtcgtatgcgttacgccgtacagatgttattgatggataacaaaaatatcactcaggtggcgcaattatgtggctatagcagcacgtcgtactttatctctgtttttaaggcgttttacggcctgacaccgttgaattatctcgccaaacagcgacaaaaagtgatgtggtgaagggcaaagcggaaacggataagacgggcataaatgaagaagaaatggcgcgccctgcaggattcgaacctgcggcccacgacttagaaggtcgttgctctatccaactgagctaagggcgcgttgataccgcaatgcggtgtaatcgcgtgaattatacggtcaacccttgctgagtcaatggcttttgatctggttgctgaacaagtgaacgaccgcgtctgattttctgatttatttcgctatagtggcaaacaaacgcacaccgctgcgcgtctgaatcaagaaaacccgtattttcatgtatcaaagtacaatttaccgccctaacggaaaattgtccgctcctatgagactggtaactatgaaaccaacgtcggtgatcattatggatactcatcctatcatcagaatgtctattgaagttctgttgcaaaaaaacagtgaattgcagattgtcctgaaaacggatgattaccgcataaccatcgattatctccgaacccgtcctgttgatttaatcattatggatatagacttacccggaacagacggttttaccttcctgaaaaggatcaaacaaatccagagcacagtgaaagtgttatttttatcatcgaaatcagaatgcttttatgctggcagagcgatacaagctggtgctaacggttttgtcagtaaatgcaatgatcagaatgatatttttcatgccgttcagatgatcctctccggatacacgttttttcctagcgaaacgcttaactatataaaaagcaataaatgtagtacgaatagttcaacgatcactgtgctatctaatcgtgaagtgaccatattacgttatctggttagcggattatctaataaagaaattgccgataagttattacttagcaataaaacagttagtgcgcataaatctaatatttatggcaagctaggtttgcattcaattgtagagcttatcgactacgccaaattatacgaattaatataatattaattataattgatcataaatatcgcatccgctttcgccacacctggccgaacaccgctggctaacgctcgataattggcaaaaaagtttagtgtgacattgccatttgcatctacttcctcagtcgggctcgcctcccccagtgcgagccgggagcgatcgctattacgtaattcgatggcgacggtttgtgccattgcgggatcatccagagccagcaggttggtatcggatgccggcgttcccgtaaataaaatcgcaactgaacccggaggacatccctccagccgcaggctaaaagggacgagtgccgtggtatcgccagcgttcagtaattgtgtcgtaggccatctgcctaaatctaccgtcttatcaatatccgctgtgtttacggtacaggagaaatcaacaacgttaccgtgcaaattgatattaatcgttcctaaagggtcagctgcccatccaatggaactccacagtaacccgcagaaacagctaaagagtagtcttctcattctccgtacctcattgataatcgacgcgtaaataccccagcgcgctaaacggcccctcggtcggtttttgaccggtaatactgataggccaggcgcgaagtgtgacattggctgccgcagctgcatccagacggaaaggaataacgctattgagatcgttaggcgtaatcggcgtatcgttctgatcggcgacaataaaacctaaatcctgattgtccgacaccatcgcctgaccagaaacggcactggcttccagacgcattgttaaataagcctgcgcagcaacattcgtacatttgaccgcaatgctcttggtttgcggcatgacgccagctggtcgattccccggccctgccgcactaaataacgatgcgccgatatcaccaaaatcaaattcaacaatctgcccggcatttaattcgcagttttgcggcacttcaacccggccaccaaaactaatggtataaacaggtgtaaccaacggatcgtaaggcgttgatgtcacatacacggtaaacatcacctgtctggggatctccaccatgttaataaagggacgaataacctttaaacgaaatattaaacgagaatccatcaccccgaatggaaggttttgcgaaacgttaggatctgttcccatccgaatataattttgcggggggaactgaatatccatcacactatcaaccagactcatcgcacctaatagataatcatgtaattgcatatatttataattatcgatagtttcctgaacaataaagttggtgacataactacggtatgtataattcaccagcgtaccgggtggacaaattgctgagacacctacccagccggatttttccggtaaaacaacaatctgccctggctggttattggtgctattaaagatatttgagagatcatagtgttcatcttctgctacgccagtactatttgcacaaacagtagcccaggatatgtttgccagacacaaacatgccatcgccaataataatctgcagattatcttattgataatttcctttatgagccaggatgtgtgcaaactgccgaaataacagtgacggcttgctgtaagctttgcttcggcaatacatagtgcgcaatgcagcgtgagttcgcgccgtctccccactgaaccagtaattcaccagacaatggcgcaccacttaaataaacttgcccgtcatcacccaccatactggttattccggtactgttttcccgtaccagtgatccaaacggcaccggttttccgccctgggtaacggtaatgagcgcccgcacgcctatgcgggtatcaaaattggcacgaaccaacgcgccttgcgtcggcacaacgctgctaatatttttttcaacatcgatggaattccccatcgtattggtatcaagcgcgatacggttataccgataaaccgtggcatacggcatcaccgcatagccgcgccagtcggttaaaatgccagtttgattttcaatgcgtacaccgcctgcgccaggcgctttaatcaaaacattggtatcccctaaaggctggctcagcgttatgccattttcatgcccgaccacaccgccagacagctgccagttaacgtcatgttgatcgcggtcgtagttatacccgacccccagcgtaccgtaagcggcctgccagtttgccgtggcgctgcccgtgtacccattattcgaggtatcaccctggcttacgtgataactcaggttgtggccttccagtaaggtcccacctacacctgccagccagctattttgcccgttgctgttacggttggcgttaaaggaggcataagcgcggtcgagcgcattttcccgggtgtagcgacgtttggtcaaaacattgaaaggcactgaaacattaagtccgacaatacgttcgttatcggggatccctacagattcattccacgaaaatgagagcgaataactgatgccaacccagctgctggtataccccacctgataccacgtatctgaatccgaagtattccagtatttttgatgggtaccagagatataaagcgagccaaagtcattaagtgattgtgaaatatttaactgcaaacggtctttacggctaaagcgtaaattgtggtaattcacgattatcggttcatcgcgatgctcaccgtcgtaatcgtaatcatattcgtacccctccattcgacgatacgcaacatcatcaagggtataaaaaccttgtgtcgaatagcggtaacccattaactgaaaattggtgccgaaggtgttcattgatttcgcatagaggaagcgaatggaatccccctcatgacgactgtcgtcggctaactgactgcgcgcatgcgttacatccagcgacactgcgccccagttcccgaggttgcgccccagccctaacaaaaaggcggtgtaattggcagataattgcgtcccgccgtaggcagtaaattcctgtggtaaaccaccgagtgccgtgccctgaaaaaagaaaggtgatgattgctgactattaccgctacgaaaatcgcccgccgtcagatcaaatttgaaacgcccttcgcgttgtaaaattggcactgttgaatacggaattgtgtaattctgctgattgccatcgcgctcgtcgatggtgacgtccagatcgccatttgaagatgtcgggtgcaaatctgtaatttcaaaagcgccgggggaaacatagctttgatagataataaaaccattttgccgaatcgttagctgggccgccgtacgggcaatcccacgtaccgttggggcaaacccttgctggctatcaggatacatattatcagaagaataaagccgtacaccacgaaatccaacgccatcgaaaatatcacttcctgtattgccgtctcccattactagttcacttttcagcggaataatggcgcgctgtacccaggtgccaatattattccactgttctgaatgatatccatttccgcgaaaatagttccaggaaccattgttgcgtaaacgccacgggccaatattaatcccgctgagctcactaaaaaaatagctatcgttaccattacctctgttaccggtgaaattataattcaggagtaaagcaggaataccttcatcccactcttcaggcggaatgtaaccgtgagcgctactcaacaacgctatctgaggaatagtgatgttcaggcgcatcgctgcaaaatcaaagttaattgtggcatcaggtacagctttcagtaaattgatgcatttattgttttgctgctgggctaactcgggaaatgcactgctattaaggccaattcgttcaagaagtacctggttaaaacagggcattaacccacctgatttatcacctgtattttctgttgtcgattcaaatacgatatcctgcgaaccaatgaactcatcattacgccagagatccacccgatacacgcccgcaggttgatgattacctctctcaaagcgcgataaatcagcaacggatgtgccattctctaataaaaatgccgggttgaaataactttccgcatagcttaaaaaggagggtaaaatggcaagagatgaataacaaattccggccagacaccaggtatacctctgcggaatatccgtagtagtgggtattttcataattagctctgatattgtcagatgattcggttagtttaagttcacttctctgaccggagttactgaaccataatcattaacggtctgaaatttcagatttccctgcactcctgagggtaagggaatttgtgaattaactctgggtgcagccatagcattccccaacttttggctgcccacttgtaagttaaccagggtgacataaaaaggtgatggattatgaacattgatatagttaccggatcgcgaaaacttgagtgtgtccggcgcttctgcgggtaattcttgtaattgaattggacggagaaataatttcatgcgcgataaaatcgccagttgcaaaacattcctgccgttcaatgcatttttatctaccgaagggatcgtcttaacattcatccagaacagagactcacgatctgctgccagcggtggaccggtgtaaataatacgcaaagtattttcgcttttgggttcactaacaaacagtggcggtgtaatgatgaatgacttttcttttacaccgctgctgttttcaatccacgaattgaccagaaagcgctcattggtatggctatttctaatccataccgcagtctgtttagcatcagcgggataaataatacgcgtggcacctaatgcgatccctccggcagcatgggcgctggccgaaatgattaaataaaatataatgagcatcaataactttattttagtcatcatagttaatacgccttgtgtattcctgacggcaaaaataaggaatataaagaaatgattgctttggtttcttacaacacatcattcccttttcatttaataaagcggcatgatacaaagtgaacatgatttcgatttacattgccaccataccgcttcagacaaccggtacattactttgttataagacgtgatatataattcaaaacaacgtggttttgattattcatatctcataataaaagtcgcgtcagcatttgcttgccctgctgatgcacttgtaccggtgcctttataacgtgcagaaaaatgaagaacgttggtcccggggatcaagttctggttggttgagaagctattcccatcaggtttgagaattgcggatgtattatcaagtatttcaataccgacacccgttgctgttgttgtattggtactggatgcaatggccaataaattatcattgattgcatcagcctgaccagaaaatgcaacggcagcattagcggcaacaacaggatcgcagtcgttcaactgaatggtgaatggaattaatgcagaggtattaccaacagcattgaaaatatcggtacgatattgaccgagtgtgacaacctggtctgccgagtcagtattcactgaacaggcagcattcaccagttcgccttcaaagtgaattgtaccgccatctacaacggcagcataactacccgtagcggcgaatagtgcggcagccagcgcagacgaaataaatcttaatttcatatatattccttcaatctcatttatcgactccacatccgtatataaccgattactttatttaagacactgatagtagtaaattcctttttatcctctaagaatgtcttaattgaaaatatgcactctattctaaaaaatagagagccccgttagatgaatacttccgcgcataatatattcaacacaaatatagacctgaagcggtaaattaccaggctgaaaattctttttatattgtcaggtatttcttaaattatcttaatccttagacaaggaaataaatcagttccagatttacaacgccatcatggacgaaaaatgaagctttcagtctcagcgacggtgcgcctcaccttcgcaagaggtcgcttcacgcgataaatctgaaacgaaacctgacagcgcgccccgcttctgacaaaataggcgcatccccttcgacctacgtaacagatggaatcctctctctgatggcagcaaagattattgacggtaaaacgattgcgcagcaggtgcgctctgaagttgctcaaaaagttcaggcgcgtattgcagccggactgcgggcaccaggactggccgttgtgctggtgggtagtaaccctgcatcgcaaatttatgtcgcaagcaaacgcaaggcttgtgaagaagtcgggttcgtctcccgctcttatgacctcccggaaaccaccagcgaagcggagctgctggagcttatcgatacgctgaatgccgacaacaccatcgatggcattctggttcaactgccgttaccggcgggtattgataacgtcaaagtgctggaacgtattcatccggacaaagacgtggacggtttccatccttacaacgtcggtcgtctgtgccagcgcgcgccgcgtctgcgtccctgcaccccgcgcggtatcgtcacgctgcttgagcgttacaacattgataccttcggcctcaacgccgtggtgattggcgcatcgaatatcgttggccgcccgatgagcatggaactgctgctggcaggttgcaccactacagtgactcaccgcttcactaaaaatctgcgtcatcacgtagaaaatgccgatctattgatcgttgccgttggcaagccaggctttattcccggtgactggatcaaagaaggcgcaattgtgattgatgtcggcatcaaccgtctggaaaatggcaaagttgtgggcgacgtcgtgtttgaagacgcggctaaacgcgcctcatacattacgcctgttcccggcggcgttggcccgatgacggttgccacgctgattgaaaacacgctacaggcgtgcgttgaatatcatgatccacaggatgagtaacatggcgacattttctttaggtaaacatccgcacgttgagctgtgcgacttgctgaaactggaaggctggagcgaaagcggcgcgcaggcgaaaatcgcgattgccgaaggccaggtgaaagtcgacggtgcggttgaaacgcgcaaacgctgcaaaatcgtcgccggtcagacagtgagttttgcaggtcacagcgtacaggttgttgcctgatccctttcccggcctgtatcaacaggccggttctcttttcagacttttgccctctacgccccgttcatccatgctgatagcatcgacattttgccgaagcgaccatcatgccaaccgttattacgcacgccgccgttcccctatgcattggtttagggttgggttcgaaagtcatccctccgcgcctgttatttgccggaatcatcctggcgatgctgcccgatgccgacgtcttgtcgtttaattttggcgttgcttacggcaatgtttttggtcatcgcgggtttacccattcgctggtgtttgcgtttgttgtcccgctgttatgtgtgctgattggacgtcgatggttcagggctgggctgattcgctgctggctgtttttaaccgtctcgttgctatcgcacagcttgctggattcggtaaccactggcggtaaaggggttggctggctgtggccgtggtcagatgaacgctttttcgctccctggcaggtgattaaagtcgcgccgtttgcattgtctcgttacaccacagcgtacgggcatcaggtgattatttctgaattgatgtgggtgtggttgccggggatgctactgatgggaatgttgtggtggcgcagacgataaccggatgcgaaaactcgcatccggcaatagcgcaattacttacgacgccaggtggtcccttgcgggccatcttccagcacgatccccatctcattaagacggtcacgcgccgcatctgccgccgcccagtctttcgctttacgggcatccagacgctgttgaattaacgcttcaatctcagccacttcgctgtcgtctgcctgcgcgccgctttgcaggaacgcttccggttcttgctccagcaggcccaatacggcggaaagtttacgcaggtgagatgccattgcattcgccgctgccatatcttctgctttcagacggtttacttcacgcgccatatcaaacagcacggaataggcttccggggtgttgaaatcgtcgtccatcgcttcaataaagcgcgcttcaaacgcttcgccaccggcaggcgcaacggttttatctgtgccgcgcagcgcagtgtagagacgctccagcgccgcacgcgcctgcttcaggttctcttcgctatagttcagctggctgcgatagtggcccgacatcaggaagtaacgcacggtttccgcgtcgtagtatttcagcacatcgcgcacggtaaagaagttacccagcgatttggacatcttctcgcggtcaaccatcaccatccccgagtgcatccagtagttcacatactgaccatcatgggcacaggtggactgcgcgatttcgttttcgtggtgcgggaacatcaggtctgaaccgccgccgtggatatcaaagtggttacccagctgcttgcagttcattgccgaacattcaatgtgccagccaggacgacccgcgccccacggagacggccagctcggttcgccctctttcgacatcttccacagaacgaagtccattgggttgcgtttgtcgtcgaccacgtcaacgcgcgcgcctgcctgcagctggtcgagatcctgacgcgacagcacgccataagttggatcggtcgggacgtcgaacatcacgtcgccgttgtccgccacataagcgtgacctttggcgatcagttgttcagtgagttcaataatttctgcgatatggtgcgtcgcgcgcggctccatatccgggcgcagaatgttcaacgcatcaaaatctttgtgcatttcggcgatcatgcgatccaccagcgccacaaagctttcgccattttcattggcgcgtttgatgattttgtcgtcgatatcggtaatgttgcgcacatacttcagcttatagccgaggaaacgcagatagcgcgcaaccacgtcaaaagcaacaaaggtacgcccgtgaccgatatgacagagatcgtaaacggtgattccacacacgtacatgccgacttccccggcgtgaataggcttaaattcctctttttggcgtgtcagagtattgaagatttttagcatcgaagattccgtttagacatgtgtgggtaattgagttgcgtataatacccatatttcccgcgcgaatcagcatacattgcgtgatgatccgatcgtgcggttatgctataacaccaccctatatatgacccgaactgggttgaagcaccaatcaaacggaacaggatgcaaaaatggttactttccacaccaatcacggcgatattgtcatcaaaacttttgacgataaagcacctgaaacagttaaaaacttcctggactactgccgcgaaggtttttacaacaacaccattttccaccgtgttatcaacggctttatgattcagggcggcggttttgaaccgggcatgaaacaaaaagccaccaaagaaccgatcaaaaacgaagccaacaacggcctgaaaaatacccgtggtacgctggcaatggcacgtactcaggctccgcactctgcaactgcacagttcttcatcaacgtggttgataacgacttcctgaacttctctggcgaaagcctgcaaggttggggctactgcgtgtttgctgaagtggttgacggcatggacgtggtagacaaaatcaaaggtgttgcaaccggtcgtagcggtatgcaccaggacgtgccaaaagaagacgttatcattgaaagcgtgaccgttagcgagtaatcgtggcgacactctttattgcagatcttcatctctgcgtggaagaaccggcgatcaccgccggttttctgcgttttttagcgggggaagcccgcaaggccgacgcgctgtatattcttggcgatctgtttgaagcatggattggcgacgacgatcccaacccactccatcgccagatggcggcagcgatcaaagcggtgtccgattccggcgttccctgttatttcattcatggcaaccgtgattttctgctcggcaaacgctttgcccgtgaaagcggcatgacattattgccggaagaaaaggtgctcgaactttatggtcgccgggtgttgattatgcatggcgacacgctgtgcaccgatgacgcgggttatcaggcttttcgcgccaaagtccacaaaccctggctgcaaatgctattcctcgctctgccgttgtttgtgcgcaaacgcattgccgcgcgaatgcgcgcgaacagtaaagaagccaatagcagtaaatcgctggcgatcatggacgttaaccaaaacgcggtagtcagtgcgatggaaaaacatcaggtgcaatggctgatccacgggcatacccatcgcccggcggtgcatgaacttatcgccaatcagcaacctgcttttcgcgtggtactgggtgcctggcatacggaaggttcgatggtgaaagtcacggcggatgacgttgagctaattcattttccgttttaaaaaacccgcaactttgctgatttcacagccacgcaaccgttttccttgctctctttccgtgctattctctgtgccctctaaagccgagagttgtgcaccacaggagttttaagacgcatgtcttcccgcaataatccggcgcgtgtcgccatcgtgatggggtccaaaagcgactgggctaccatgcagttcgccgccgaaatcttcgaaatcctgaatgtcccgcaccacgttgaagtggtttctgctcaccgcacccccgataaactgttcagcttcgccgaaagcgccgaagagaacggttatcaggtgattattgcgggcgcaggcggcgcggcgcacctgccaggtatgattgccgccaaaacgctggtgccggtgctgggcgtgccagtacagagcgccgcactgagcggtgtcgatagcctctattctatcgtacaaatgccgcgcggcattccggtgggtacgctggcgattggtaaagctggcgcggcaaacgcggcgttactggcagcacaaattcttgcgactcatgataaagaactgcaccagcgtctgaatgactggcgcaatgcccagaccgacgaagtactggaaaacccggacccgcgaggtgcggcatgaaacaggtttgcgtcctcggtaacgggcagttaggccgtatgctgcgtcaggcaggcgaaccgttaggcattgctgtctggccagtcgggctggacgctgaaccggcggcggtgccttttcaacaaagcgtgattaccgctgagatagaacgctggccggaaaccgcattaacccgcgagctggcgcgccatccggcctttgtgaaccgcgatgtgttcccgattattgctgaccgtctgactcagaagcagcttttcgataagctccacctgccgactgcaccgtggcagttacttgccgaacgcagcgagtggcctgcggtgtttgatcgtttaggtgagctggcgattgttaagcgtcgcactggtggctatgacggtcgcggtcaatggcgtttacgcgccgatgaaaccgagcagttaccggctgaatgctacggcgaatgtattgtcgagcagggcataaacttctctggtgaagtgtcgctggttggcgcgcgcggctttgatggcagtaccgtgttttatccgctgacgcataacctgcatcaggacggtattttgcgcaccagcgtcgcttttccgcaggccaacgcacagcagcaggcgcaagccgaagagatgctgtcggcgattatgcaggagctgggctatgtgggcgtgatggcgatggagtgttttgtcaccccgcaaggtctgctgatcaacgaactggctccgcgtgtgcataacagcggtcactggacacaaaacggtgccagcatcagccagtttgagctgcatctgcgggcgattaccgatctgccgttaccgcaaccagtagtgaataatccgtcggtgatgatcaatctgattggtagcgatgcgaattatgactggctgaaattgccgctggtgcatctgcactggtacgacaaagaagtccgtccggggcgtaaagtggggcatctgaatttgaccgacagcgacacatcgcgtctgactgcgacgctggaagccttaatcccgctgctgccgccggaatatgccagcggcgtgatttgggcgcagagtaagttcggttaactggtgctctattcttgccggatgcggcgtaaacgccttatccggcctaccgatccggtacccattgtaggcctgataagatgcgtcaagcatcgcatcaggcattgtgcaccaattgccggatgcggcaccggttgtaggcctgataagacgcgtcaagcgtcgcatcaggcacaaatgtctaatgcctacgactacagcgaaatacaggtccccgcttcgcccgccagcgtctcttcaattcgcgataacgccccaatccacgcgggtttaccacggcttctgacataaccactcaccgccgttaccttcggccccatcgaaccatcggctttggcaaatggcgctaactcatccggtgtggcatggcgaatggcgcgttgctgcggcgttccccagttttcatataccgcatcagcatcagtgaggatcaccagcccatcggcgttaatctgctcagcgagcaacgcagcagcgagatctttatcaatcaccgcttcactccctgccccatcttccgtcacaggcacaccgccgccgccactgcaaatcaccacatgcccctctttgagcaacaactcgatggcttcgctgtcgagaattttacgcggttgcggagacgccaccacccggcgcaaatatttaccatcacgtttcatctgccagccgtaagccgcttccagtgcctcttgttcttctggctgataaaccggaccaataaatttctctggctgcaaaaacgccggatcatcaggcgaaacctcaatgcgcgtcagcaccgtcgtcacgggcggcatctgcggctgtgcgctcaaactctgcgccagcatatagccaatcatcccctgactttctgccaccagcacatccagcggatacggttctacctctttccacgccagattctgcaatgccagcagccccacctgcggcccgttgccgtgaacaatcgccagccgataagaacgggccaggcgcgccagcgcgggtacagcactggcgatattgcgatattgattttctgccgtcagcgcctcaccgcgctggagtaaggcgtttcccccaagagctacaaccagtgttttcatggttttccttgtaataattgttgaccaagccagaaccccagcagtgtatctgcccctgacgtatgccccagcgccagcagcgaatcaatcgcaacagcggtacgtttcgggcaactcagagcatgaacaaagtgcaggagtggcgaggcgaaatatccttgcgcggcataacgtaaataactgacgctcaccgctgtggtaacgagttgcagattgtcggaacaggcaaaaaactggcgaccggagcgcgcatctaaagcgccataataccaggccgccagcagcattccgctcagcgtgtcatcatgactcggcgttaatccggggcctttacccagccagtgccgccagtcggtcttaacgccattgagcgcggcctgaaaacagtgacgaaactggcgtaactcagcaggcagcggatcgcttgccgccaacgccagtggcccgaaaagcccggtttcctccgcgcgttgcatccatgcagctgcaagtggttgaggatgcgcaggcggcgtaatacgcagcaaacaataacgctgtggctgtttaaccgtgaaacgcctgaggcgaatcccttgagccacaacctgtggtcgttcattgccgcataatccaccgcataacgcatcgaattgcgcacggcgaagcatccatcctccggggccgaaaccactaccctgacgatgcagcgttaacagttcgccgctttccgtcatcaggttaatcgcccgtcgccacactcccgctaaccgccaggactggcgataattcggtgcactacggctggcaagcagaggatggatgatcgtcattgcgcgttcctcaaccaatccccatgctttcagccagtgcttccagcgcctgttcaaaacacgccagcggtgcccgcacagtgcctgcgccaatctgcccgatccccgcctctttatgggcgataccggtattgatgagtggcgtaatgccggtttctaccacgcgacgaatgtccagtcccaggcacgcgccctgaaaatcccagcctgggatctgcaactgcatattgcgctcaaggtaaatttccgccatctcttcagataccgctctggccgcttccatgccacccgcaccgacaaagcgcgttacgccaggcgctgcgatcattgccgcacctccgataccaaaggtttcggtaatcgcgctatcgcccatatccgggttcgcctgctcctgcgagaagccggtgaaaaacagaccttgcggagtgtttacaggcgcagtaaaccagcgttcgcccagcccgcttacccgaatcccgaacatattgccgttgcgggtcattgccgtgacgatgctgcctgcgcggatcatcgcgccagcatccatcgccgccttgcagtaagccatcgcgaggttgaggaagaactgatcggtcacgctgaggaaatccatcacttcggcgatgtgctgtttatcatgatcgaggcgagcaatttgtggggccagcgcacgcattaacagtgcagaggaagcaatattgcgttgatggaactcatcgcccatcgtaatgccctgcgccatcatcgccgtgagatcgataccgcgctccatgcgccccagcgccgcgcttaatactggcattaacacatcgcgcatccagcgatggcgagtcaggacatcttcgccgtaagcgccaaaacgcatcactttgccgataccttcgttgaggttgcagtacgcccggttgccgtcggtcacgttctcaaccaccagcatcggcatactggcagaagtaataccgcccattggaccgacggcattcacatggtgacaaggaatgaagttcacttccccctgctccagtattgccagcgcctgcgcttcatctttcgcccagccttcgaacagacatgcgcccacgcacgcccctttcatgggtccggtcatctcctgccagcgcattggcggcccggcgtgaagcagtgttttgccctcgtttagttcgctgataagtgaagaagccggttgcacatccagccagtgtggacgagcgcgacgaatttgttcgataaccgcagcattggcttgcgccactgatgtaaacatgggaaccccttattgcaaacgttctaataaacgagccagttttttattgccgccggcgactggcgaccattggtaatgcacaaccggtttgctggcgctttgtagctccagcgcaaagctgcgtaatccgatgttaatcacggcgacgttttccagtaatgacggtgtgtgttgctgagtggcaggcgaaagcggacgaatcagtgccgccgccagcaaggtggcttccggcagcgaactcactaccgcgatccctgcatcttccagcgtggcgatttgctgcgagcggcattgcgggtcacgttcagtgcctgtcaccgtggcaatggcatacagtggttgattgtctgaacgcgcggcacatgctttttgccaggcgcttaccagcgaggcggcaggatcggcggtcgcaccgaagccaatcacgacatcaagcagcaatacgcgcacttgcggtttagcgccgagatcggcaattaactgattgcgtaaggctgggtcgatcatcggatggggacgcccgacggtgtagaaatcatcgccgaggtcaataatctggtgaccatcggcgtcgagcatcatgccgtgatgatgggtatcgtcggcttccacgccaaggtgtccagcaagtaatcccgccgcttcggcagccagggtaccgccggtatacaaaccgcaaataaatccgctgctggcaggcgttatcgcgttacgtcgcgccgtaacgcgtgaaagcaggcaagccaggcgtgcggcctcatccagcgaggaggcaaaccagacattctcgtcgcgggccaccgccggggtataacctaaaaacagcgccaccgtcggtttgccggttgctttcatggcattaacaattttcagacgcacagcttcggcaggcggttttgaaacaaatgccagcacttcgcttttctcgtctgcactgagcatttccagcgccgtcagcgcactgatgccgcccacttcacggctgaggtcgcgcccgccaaggccaatcgcgtgagtaattccctcccctgccagcgcaatctgcgaacacagttcctgaatcccggtaccggaagcgccaatgacgccaatattgccttccggcatcacgttagcaaaagccagcggcgtgccggcaatcatcgacgtaccgcagtccggccccatcaccagcaagcctttttcccgcgcgcggcttttaagttggatttcatcttccagcgtgacgttatcggagaacatcatcacgttgaggttgcgatccagcgcctggttcgccagctccgccgcatactcgccagccactgaaatcagcgccagactggcgtcgggtaatttctgacaggcactgtcccagcgacgcacctgcgtcaacgcctggctgctgcctgacccctgcgccagttgttttagcgcctcttcaagctgctgcataatcgcctgcgcgatccccgcatccgccgcttcgctacgaattgccacgcaaatatcgttcggcgtggcgttattaaaatcgtcatgccagaaacctgtggtatctaataacgctttattggcgggcgtacccatcattacggaaacatcatcaacattttctgattcgctgagttttcgtgaaataatcattaaactgaccgaatcctgaaaacacccttttttaataaaggcgtggatcataacaactccttaaaaattgcacccatggcaattgcacgagcagtgttaatgtggcgattacggtatcgatgacaacgagtaaataaggtgatgaatatcacacaggaattattaacaaaagaattcaaataaccgccaggctattactcattattttttaataagcgtggttgttttaaaaatcaggttaaaagtgagcggattatcaaataaattctaactatattttcttgcctgtctggatcacataatccagatattttccctgtatgttaattgcagtcatgcttcacaccgtcgttaaaaaggaagacagatgaaaatcagtcgggaaacactccaccagctaattgagaataaactctgccaggctgggttaaaacgtgagcacgctgcaaccgtggctgaagtattggtttacgccgatgccagagggatccactctcatggcgcggtgcgcgtggaatactacgcggaacgcatttcaaaaggcggcaccaaccgcgaaccggagtttcgtcttgaggaaaccgggccgtgctcggcaattttacatgccgacaatgccgccggacaggtcgcggcgaaaatgggtatggaacatgccatcaaaaccgcccagcaaaatggcgttgcggtggtcggtatcagccggatgggtcacagcggcgcaatctcttattttgtgcagcaggcagcccgcgccggattcattggcatttcgatgtgccagtccgatccaatggtggtgccgtttggcggcgcggaaatttactacggtactaaccccctggcctttgccgcgccgggagaaggcgacgagatccttacctttgatatggcgactaccgtacaggcatggggaaaagtgctcgacgcccgctcgcgtaatatgtctatcccggatacctgggcggtcgataaaaacggtgtaccaacaaccgatccgttcgcggtacatgctctgctccccgccgccgggccaaaagggtatggcctgatgatgatgattgacgtcctctcaggcgtcttactcggcttaccgttcgggcgacaggttagttcgatgtatgacgatttacacgcagggcgtaatttggggcaattacatatagttattaatccgaactttttctcctccagcgaattattccgtcaacatcttagccagaccatgcgcgaattaaatgccattacccccgcgcccggttttaatcaggtttattatcccggacaggatcaggatattaaacaacgcaaagccgccgtcgaaggcatcgaaattgttgatgatatttaccagtatttaatttccgacgcgctttataacacgtcatacgaaacgaaaaatccctttgcgcaataattattgagacaggactttcttatgattacacatttccgtcaagctatagaagaaacgctgccctggctttcctcttttggcgctgacccagcgggtgggatgacccgtttactttattcgccggaatggctggaaacccagcagcaatttaaaaaaagaatggcagcaagcgggctggaaacacgtttcgatgaagtggggaatttatacggtcgcctgaatggcaccgaatatccacaggaagtggttctgagcggttcgcatatcgggtaatgctgccaacttactgatttagtgtatgatggtgattttaaggtgcttgcgcaagcaccttaaaatcaccatcatacactaaatcagtaagttggcagcattaccgacatcatctactaacgcacaattgctacaggtcggtgtattaggcacgggtgaactgaatattaccaccggaggtatagttaaagcgcgtgatacacagatagctctcaatgacaaaagtaagggcgacgtgagggtggatgggcagaactctcttcttgaaacattcaatatgtacgtagggacatctggtacgggtacgttaaccctgacgaataacggtacgctgaatgtcgaaggtggagaagtttacttaggtgtttttgagcctgctgtaggaacgctaaacattggtgctgctcacggtgaggcggcggcagatgccggatttatcaccaatgcgacgaaagtggagtttggtcttggcgaaggcgtttttgtctttaatcataccaataacagtgatgccggctaccaggtcgatatgctgattacaggtgacgataaagacggaaaagtgatccatgatgcaggccatacggtgttcaatgcagggaatacttatagcggtaaaacgctggtcaatgacggcctcctgaccattgcgtctcatacggcagatggggtaacgggcatggggtcgagtgaagtaaccattgcaaaccccggtacgctcgacattctcgcatcaacgaacagtgcaggagattacacgctgaccaatgcgctcaaaggcgatggcttgatgcgagtgcagctgtcatcctccgacaagatgtttggctttacccatgcaacagggactgaattcgccggtgttgcccaactgaaagacagtaccttcactctggaacgcgacaacaccgctgcgcttactcacgcgatgttgcagtctgacagtgaaaataccacatcggtaaaagttggagagcaatccattggtggactggccatgaatggaggtaccatcattttcgatacggatattcctgctgcgacgctcgcggagggatatatcagcgtcgatacgctggttgtcggcgcgggtgactacacctggaaaggccgtaactatcaggtaaacgggacgggcgacgtgcttatcgacgtgcctaaaccgtggaatgatcccatggcgaataaccctctgacgacgctcaatttgctggaacacgacgatagccatgtcggcgttcaactggtgaaggcgcaaacggttattgggtcgggtggctcattaacgttacgtgatttacagggcgacgaggtggaagcggacaaaacgttacacattgcgcaaaacggaacggtggtcgccgagggtgattatggattccgcctcacgaccgcaccaggtaatggtttgtacgttaactatgggctgaaagcgctgaacatccatggtgggcaaaagctgacgttagccgaacatggcggagcctatggcgcaacggccgatatgtcggcaaaaatcggtggtgaaggggatctggcaatcaatacggtgcgacaggtttcgctttccaacggtcagaacgactatcagggggcaacctacgttcagatggggacattacgtaccgatgcggatggtgcacttggcaacacccgggaactgaacatcagcaacgcggccatcgtcgatcttaatggatcgacgcagacggtagagacattcaccgggcagatgggttcgactgttttgttcaaagagggggcgctgacggtaaataaaggtgggatcagtcagggtgaactgacaggtggcggaaacctgaatgttacagggggaacgctggctatcgaggggcttaatgcacgctacaatgcgttaaccagcattagcccaaatgcggaagtcagcctcgataatactcaggggttaggcagaggaaatattgccaatgacggtctgttaacgctaaaaaacgtgactggcgaactgcgtaatagcataagcgggaagggtatcgtgagcgcaaccgccaggacagatgtagagttggatggcgataatagccgctttgtggggcaattcaacattgatacaggcagcgcgctcagcgtcaacgagcagaaaaacctgggtgatgcttccgttatcaataatggcctgctcaccatctccactgagcgtagctgggcgatgacgcacagtatcagcggtagcggtgatgtgacaaaactgggtaccgggatcctgactcttaacaacgattccgcggcgtatcagggtacgacggatatcgtggggggggaaattgctttcggttccgactctgccattaatatggcaagtcaacacattaatatccataacagcggtgtgatgtcgggaaatgtcaccactgcaggtgatatgaacgttatgcctgggggggcactgcgtgtcgctaaaaccactatcggcggcaacctggagaatggcggcacggttcaaatgaatagcgaaggggggaaaccggggaatgtactgaccgttaacggcaactataccggaaacaatggcctgatgacgttcaacgcgacgctgggcggcgataattcgcccaccgataagatgaacgtgaaaggcgatacccaagggaacactcgcgttcgggttgataacattggcggcgtcggtgcacaaacggtcaacggtattgaactcattgaggttggcggtaattctgcaggtaacttcgcgctgaccaccggaactgtcgaagctggggcttacgtctacacgctggctaaagggaaggggaatgacgagaaaaactggtatctgaccagtaaatgggacggcgtaacgccagcggatacacccgatcccatcaataatccccctgttgtggatccggaaggcccatcagtttatcgcccggaggccggaagctatatcagcaacattgccgcagccaactcgctgtttagccatcgtttacacgaccgtctgggtgagccgcagtatacagattcactgcattctcaggggtcggcaagcagtatgtggatgcgtcatgtcggagggcacgaacgttcaagggccggtgacggtcagctaaatactcaggctaaccgctatgtattgcagctaggcggcgatttggcgcagtggagtagcaacgcgcaggatcgctggcatcttggcgtgatggcaggctacgccaatcagcacagtaatactcagagtaatcgtgtgggttataaatcggatgggcgcatcagcggttacagcgctgggctgtacgcgacctggtatcagaacgatgcgaataagaccggcgcttatgttgacagctgggcgctgtataactggtttgataacagcgtcagttccgataaccgttctgctgacgactatgattctcgcggtgtgacggcctctgttgagggtgggtatacctttgaagcgggaacatttagcggcagcgaagggacgctgaatacctggtacgtccagccacaggcgcaaatcacctggatgggtgtgaaagattccgaccatacccggaaagacggaacgcgcattgaaacggaaggcgacggaaatgtgcaaacgcgacttggggtgaaaacctacctgaacagccatcaccagcgtgacgatggtaaacagcgtgagttccagccttacattgaagcgaactggatcaacaatagcaaagtctacgccgtgaagatgaatggtcaaaccgtaggccgtgaaggtgcgcgtaatctcggtgaagtacgtaccggggttgaggcgaaagtaaataacaaccttagcctgtgggggaatgtcggtgtgcaactaggtgataaaggctatagcgatactcagggcatgctgggagtgaaatatagctggtaaaccgtataagccgcatgtcgagatggcatgcggcttaatattgccgacttcaaacggcgcatcaacgccttatttaaatcctcctttttatccgcgatcgcggatatcgcagcgtttatcccgtagagcggataagatgtgtttccagattgacttatcctcactaaaggataaaacttataatatccccttaagcggataaacttgctgtggacgtatgacatgatgagctttcagaagatctatagcccaacgcaattggcgaatgcaatgaaactggttcgccagcaaaatggctggacgcagagcgagctggcgaaaaaaattggtattaagcaggcgacgatttccaatttcgaaaacaaccctgacaataccacgctcacgacattttttaagattttacagtcgcttgaactctcaatgacgctatgcgacgcgaaaaatgcctcgccagaatcaacagaacagcaaaatctggagtggtaatgcctaaacttgtcacttggatgaacaaccagcgggtaggcgagttaacgaagttagccaacggcgcgcacacctttaagtatgcaccggagtggttagcaagccgttatgccagaccgttgtcactttcgctgccattgcagagggggaatatcacctctgatgccgtatttaacttcttcgataacctgttacccgatagcccgattgtacgtgaccggatcgttaaacgttatcatgccaaatccagacaaccgtttgatttattgtcagaaatagggcgagacagcgttggtgccgtgacgttaatactcgaagacgaaaccgtaacgcatccgataatggcatgggaaaagcttactgaagccagacttgaagaagtattaacggcttataaagcagatatcccgctaggcatgattagagaagaaaatgactttcgcatctcggttgctggcgcacaggagaagacagcactgctcagaataggcaatgactggtgcattccgaaaggaataacgccgacgacgcacatcattaaattaccgattggcgaaatcaggcagcccaatgcgacgctcgatctcagccaaagcgttgataatgagtattactgtctgctgctggcgaaagaacttgggttgaatgttccggacgcagaaatcattaaagcgggaaatgtgcgtgcgttagcggtcgaacgttttgacaggcgttggaatgctgagcgaacggttttacttcgcttgccacaggaggatatgtgtcagacattcggtttaccttcatcggtgaaatatgaatcagatggaggcccaggcatcgcgcggatcatggcttttttgatggggtccagcgaggcgctgaaagatcgctatgattttatgaaattccaggtcttccagtggttgattggcgcaacggacggtcatgcaaaaaacttctccgtatttattcaggctggcggcagttatcgactcacgccattttacgacatcatttcagcatttccggtccttggcggtacgggaatacacatcagcgatctcaaactggcaatggggcttaacgcatccaaaggcaaaaaaacggcaatcgataaaatttatccgcgacattttttggcgacagcaaaggtgctgagattcccggaagtgcagatgcatgaaatcctgagtgactttgccagaatgattccagcagcactggataacgtgaagacttcattaccgacagattttccggagaacgtggtgacggcagttgaaagcaatgtgttgaggttgcatggacggttaagccgagaatacggtagtaagtgagatatggggtttggtcattgttaatgagcatgacaatcatgaccgccaacgactggattcttccttggtttatattggtgcgcataatgtatattatgttaaatcatgtctgagtgatgcgaagtgcttttctggtagtcgttattcgttcagggttcaagaacttaagcctctcctctttcataattggcctgtgcatggagaaatagcctggttattccctgccccatgctaagagcgcagtgtctgtcgcatagacactgcatacgaaaacaccagagggtgctgttacttatttaaggacggatcaagcgggaatgagtccactccggtatcagaaatggctacgtctcaatgaagtcaggcgaccgatgctgaatgaacattacgatgtcaccacagcagcctatgctgtcggttacgaaagctatcccatttcagtcgggaatattcgcggatgtttggagagtcacccaagagagatattaccaggttaagaaagtctgtcggacagctttaataaaccctgcacttatctgtttagagcaattcggtgttagtttcagcaagcaaacattaaccatagctaatgatttatagccatattaaccattggtagctcttgacctttcctgacacttcccttgttcgcaataatattctgtttagtcacggtttataaataacatgcataatgaaatcgtcatgttatttagcgacataaaatgtttttgcaaatactctcttcaacaagtgcagcaataaacttgttgtggaaccaatatccaggtcgcaggatatcgctattctacgcaaggtttttataacttatccgacagtgcctacagtcgaatgagtggttacaccgtcaagcctcctaccggagacaccaatgagcagacacaatttattgattattttaatctgttctacagtaagcgtggtcaggaacaaataagcatctctcagcagcttggaaattacggtacgacatttttcagtgccagtcgccaaagttactggaacacgtcacgcagcgaccagcaaatatcatttggattaaatgtgccgtttggtgatattacgacttcgctgaattacagctattccaataatatatggcaaaacgatcgggattatttactcgcttttacgcttaatgttcccttcagtcattggatgcgtacagacagtcagtcggcatttcgtaattcaaacgccagttacagtatgtcaaacgatttgaaaggcggcatgaccaatctatcgggggtttatggcactctgctgccggataataacctgaattatagcgttcaggtcggtaacacccacggaggtaatacatcgtctggcaccagtggttacagttctcttaattatcgtggagcttatggtaatactaatgtcggttacagtcggagtggtgacagcagccagatttattacggaatgagtggtgggattattgctcatgctgatggcatcacctttggacagccgctgggcgacacaatggttctggttaaggctcctggtgctgataatgtcaaaatagagaaccagaccggaattcataccgactggcgtggctatgccatattaccatttgcgacagaatatagagaaaaccgtgttgctcttaacgcgaattcccttgcagataatgttgaactggatgaaaccgtggtcactgtcatcccaactcacggtgctattgccagagcaacatttaatgcacaaatcggcgggaaagtattaatgacgttgaagtacggtaataagagcgttccattcggtgcaattgtcacacacggagagaataaaaatggcagcattgtcgcggaaaacggtcaggtttatctgactggacttccacagtcagggaaattacaggtttcatggggtaaagataaaaactcaaactgtattgtcgagtacaagcttcctgaagtttctcctggtaccttactgaaccagcagacagcaatctgtcgctaaggaacaatagattatgaaatacaataacattattttcctcggtttatgtctggggttaaccacctattctgctttatccgcagatagcgttattaaaattagcgggcgcgtcctcgattatggctgcacagtctcatcggattcgcttaattttaccgtagatctccaaaaaaacagtgccagacaatttccaacgaccggtagcacaagtccagccgtcccttttcagattacgttaagtgaatgcagcaaagggacaacgggggttcgggttgcatttaacggtattgaggatgcagaaaataatactctgttgaaactggatgaaggaagcaatacggcttccggtttgggtatagaaatactggacggaaatatgcgtccggtgaaattgaatgaccttcatgccgggatgcagtggatcccactggtaccagaacagaacaatattttgccttactccgctcgtctgaagtcaactcagaagtccgtcaatccgggactggtgagggcttcggcaacctttacccttgaatttcaataatcagagtcagatatgaaaagacttcacaagaggttcctgttagctacgttttgcgcgttattcacagcaactctccaggccgccgatgtcactatcactgttaatggtcgggtagtcgctaaaccctgcactattcaaaccaaagaagctaacgttaatctcggggatctttatacgcgcaatctgcaacaacctggttctgcatctggctggcacaatattactctgtcattaaccgattgtccggttgaaacaagtgtagtgacggcaatcgtgacaggttcaactgacaatacgggttattacaaaaatgaaggtactgccgaaaatattcagatagagctgagggatgaccaggatgcgacgttaaaaaatggcgatagcaaaacggttattgttgatgagatcactcgtaatgcacagtttccacttaaggcaagagctatcacggtgaatggaaacgcaagccagggaacgatcgaggcgctaatcaatatgatctacacctggcaataacgtcgattcgattttcttagccttctttttaaatcaattttttaaccttaggatatatcatgggtaaaacaatcagtataaaggtcctgttcggtatttattttctattaatggcaggtaaagtttttgccttcagttgtaatgtcgatggcgggtcaagtattggagctggtacaacctctgtttatgttaatctcgaccctgtaatacagccgggccagaatctggttgtagacttgtctcagcatataagttgctggaatgattacggcggctggtacgacactgatcatataaacctggtacaaggctcagctttcgcaggctctctacagtcatataagggatcgctgtactggaataatgtgacctaccccttcccgttgacgacaaataccaacgtattggatattggtgataagacaccgatgccattaccgttaaaactctatattaccccagtcggggcggccggtggagttgtcataaaagccggggaagttattgcccgtattcatatgtataaaattgccacgttaggaagcggaaatccgcgtaattttacgtggaatattatttcaaataacagtgttgttatgccaacaggcggctgcactgttgacagtcgtaatgtcaccgtggatctcccggactttcctggaagcgcagaaataccccttggcgtatattgctcaagcgaacaaaagctctcattttatctttcgggtgccaccactgacagtgcccgacaagtgtttgctaacacggcacctgatgcaacaaaagcatcgggagtgggtgtctctctgatacgtaatggaaaaatactggctgcgggagaaaatgtctccctggggacagtaaataaaagcaaagtacctctgggtttaagcgcaacctatggacaaacagggaacaaagtttcagccggaaccgtccagtcagtcattggtgtcacttttatctatgaataattgtgattttgaccttagtctatgcgctccattcacgaaaattgcgcggataattattttgtgaaagctattatcctacacctgtaagaaaatccgcgcacaattgaagccagagtcttattttttatattaaaaaatatgttaatttaaacactatgagagatgatgcttaccttatcgtatttaatctattgtttaacgataatagattaaaaatagaaagagagtagtcccctactcttatatatccatgttggcgataatccctttgtatgtactgtgcatcatcgctattacaaatcctaataattcatttccacacaggataagtagatgaagaaaaaaattgaatcctaccagggtgctgccggtggttggggtgctgttaaatccgtagcgaatgcagtacgtaagcagatggatatacgccaggatgttattgccatgtttgacatgaataagccagagggctttgactgtccgggttgtgcatggccagatcctaagcacagtgcgtcattcgacatttgtgaaaacggcgcaaaagcaatcgcctgggaagtcacggataagcaggtaaacgcctctttctttgctgagaatacggttcaatcattacttacctggggagaccacgagcttgaggctgcggggcgactcactcagcctttgaaatatgatgccgtcagcgactgttacaagccattaagctggcaacaagctttcgatgaaattggcgcacgccttcaaagctatagtgatcccaatcaggttgaattctatacttcgggccgcacttccaatgaagctgcctttctttatcagctttttgcccgtgaatacgggagcaataactttcccgactgctccaacatgtgccatgaaccgacaagcgtgggtttggcagcgagtatcggtgtaggtaaagggaccgtgttgctggaagactttgagaagtgcgatttagtcatttgcattgggcataaccctggtacaaaccaccctcgcatgctgacttcgttgcgcgctttagtgaaacggggagcgaaaatgatcgccatcaatcctctacaggaacgtggcctggagcgatttactgcaccgcaaaacccgtttgaaatgctgacgaactctgagactcagttggccagtgcctactataacgtgcgcattggtggtgatatggcgttgctcaaggggatgatgcgcctgttaattgagcgcgatgatgctgcaagcgccgcaggtcggccctcattgctggatgacgaatttattcaaacgcataccgtcggctttgacgagctacgccgtgacgttctcaattccgagtggaaagatatcgaacgtatttctggattaagtcagactcaaatcgccgaactggctgatgcatatgccgctgccgaacgaaccattatctgttacggaatggggatcactcagcacgaacatggtacccagaatgtacagcaactggtcaatctgctgttgatgaaaggtaacattggcaagcctggtgcgggtatctgcccactacgtggccactctaatgtacagggcgaccgaaccgtcggtatcaccgagaaaccgtctgcagagtttctggctcgcctgggtgagcgctatggcttcacaccacctcaagcacctggacatgctgcaattgccagcatgcaagcaatatgtacagggcaggctcgagcattgatctgcatggggggcaactttgcactggcaatgccagatcgggaagcgagcgctgtaccgttaacgcaattagatctggcggtacacgtagccactaagcttaaccgctctcatctgctgaccgcacggcatagctatattctgccggttctgggacgtagcgagattgacatgcaaaaaagcggtgcgcaggcggtaaccgttgaggattcaatgtcgatgattcatgcctcgcgtggcgtgttaaaacccgccggtgtaatgctgaaatcagagtgtgcagtggtcgcgggaatcgcgcaggcagcactaccccagagcgtggtagcctgggagtatctggtggaagattatgatcgcattcgcaatgacattgaagctgtgctgccagagttcgccgattataaccagcgcatccgacatcctggtggttttcacctgataaacgctgctgctgaaaggcgctggatgactcagtcaggtaaggctaatttcattaccagcaaagggctgttagaagatccctcttcagcgtttaacagtaagctggtcatggcgacagtacgcagccacgatcagtacaacacgacgatttatggtatggatgatcgctatcgaggggtattcggtcaacgagatgtggtctttatgagtgctaaacaagctaaaatttgccgtgtaaaaaacggcgaaagagttaatcttattgcgcttacgccagacggtaagcgcagctcacgccgcatggatagattaaaagtggtcatttaccctatggctgaccgctcactggtgacctattttccagaatcgaatcacatgctaacacttgataaccacgatccattaagtggcattcctggctataaaagtattccggttgaattagaaccatcaaattaatgcctcttctcatttcttctgctgtcatccgcacagcagaagaatccctcattgactattatcgcgcaatttgctcacatggattaaattaaactacatactataagatataaacttctgcctacagctgtaagaaactccgttcagtactgaagcgccagtcctatttcctcttttctccggcctgttatattaagcatactgattaacgatgcttaacgttattcgcttaataaacatatttgaaatgcatgcgaccacagtgaaaaacaaaatcacgcaaagagacaactataaagaaatcatgtctgtaattgtggttgtcttattactgacccttacgttgatagccattttttcggcaattgatcagctgggcatttcagaaatgggtcgcattgcaagagatcttacacatttcattatcaatagtttgcaagactgaaaataaacagcaaattataaatatgaaatgttaaaaaagtatcgataaaaactttattgttttaaggagataaaatgtcgctcgtttgttctgttatatttattcatcatgccttcaacgctaacattttagataaagattacgccttctctgacggcgagatcctgatggtagataacgctgttcgtacgcattttgaaccttatgagcggcattttaaagaaatcggatttaatgaaaataccattaaaaaatatctacaatgcactaacatccagacagtgacggtgcctgttcctgcgaagtttttacgtgcttcaaatgtaccgactggattgcttaatgaaatgattgcttatctcaactcggaagaacgcaatcatcataatttttcagaacttttgcttttttcttgcctgtctatatttgccgcatgcaaaggtttcattacactattaactaacggtgtgctatccgtttccgggaaagtgagaaatattgtcaacatgaagctggcgcacccatggaagctgaaagatatttgtgactgcctgtacatcagtgaaagcctgttgaagaaaaaactaaagcaagagcaaacgacattctcacagattctattagatgccagaatgcagcacgcaaaaaatttgatacgcgtagaaggttcagtcaataaaattgccgaacaatgtggttatgccagtacatcttattttatttatgcgttccgcaaacatttcggcaacagtccgaagagagtttctaaggagtatcgttgtcaaaggcacacgggtatgaacacgggcaacacgatgaatgctttagctatttgattatttgctaacgagtagtcaactacacacgctacgtaagaattaaatggggcagccattccctgccccgcgttgtttttaggcgatatatttattgaaataaataagtgacattcatcacatatttatgcatttgcataacctgttgcatgattatttatgatctcaattcggtattttgtcagtaaaatacaataatttattaaatatcaatatattagttgtttatcggcgagaaattacttagtagaacagaaagtaatgtcaacgctttatggactgttatttccctttttttagctaaatctgctatctctttatgtgactaacttcacttacatccacttatttctcttcgtaaaattactttggaattaagtacaataagaagaggaacatttatgaagtctgcattaaagaaaagtgtcgtaagtacctcgatatctttgatactggcatctggtatggctgcatttgctgctcatgcggcagatgatgtaaagctgaaagcaaccaaaacaaacgttgctttctcagactttacgccgacagaatacagtaccaaaggaaagccaaatattatcgtactgaccatggatgatcttggttatggacaacttccttttgataagggatcttttgacccaaaaacaatggaaaatcgtgaagttgtcgatacctacaaaatagggatagataaagccattgaagctgcacaaaaatcaacgccgacgctcctttcattaatggatgaaggcgtacgttttactaacggctatgtggcacacggtgtttccggcccctcccgcgccgcaataatgaccggtcgagctcccgcccgctttggtgtctattccaataccgatgctcaggatggtattccgctaacagaaactttcttgcctgaattattccagaatcatggttattacactgcagcagtaggtaaatggcacttgtcaaaaatcagtaatgtgccggtaccggaagataaacaaacacgtgactatcatgacaacttcaccacattttctgcggaagaatggcaaccgcaaaaccgtggctttgattactttatgggattccacgctgcaggaacggcatattacaactccccttcactgttcaaaaatcgtgaacgtgtccccgcaaaaggttatatcagcgatcagttaaccgatgaggcaattggcgttgttgatcgtgccaaaacacttgaccagccttttatgctttacctggcttataatgctccgcacctgccaaatgataatcctgcaccggatcaatatcagaagcaatttaataccggtagtcaaacggcagataactactacgcttccgtttattctgttgatcagggtgtaaaacgcattctcgaacaactgaagaaaaacggacagtatgacaatacaattattctctttacctccgataatggtgcggttatcgatggtcctctgccgctgaacggggcgcaaaaaggctataagagtcagacctatcctggcggtactcacaccccaatgtttatgtggtggaaaggaaaacttcaacccggtaattatgacaagctgatttccgcaatggatttctacccgacagctcttgatgcagccgatatcagcattccaaaagaccttaagctggatggcgtttccttgctgccctggttgcaagataagaaacaaggcgagccacataaaaatctgacctggataacctcttattctcactggtttgatgaggaaaatattccattctgggataattaccacaaatttgtccgtcatcagtcagacgattacccgcataaccccaacactgaggacttaagccaattctcttatacggtgagaaataacgattattcgcttgtctatacagtagaaaacaatcagttaggtctatacaaactgacggatctacagcaaaaagataaccttgccgccgccaatccgcaggtcgttaaagagatgcaaggcgtggtaagagagtttatcgacagcagccagccaccgcttagcgaggtaaatcaggagaagtttaacaatatcaagaaagcactaagcgaagcgaaataactaaaccttcatgcggcggatttttccgccgccttattgagcgagatagcgatgcacgttacagccaagccctccagttttcaatgtaatctcaaatgtgattactgtttttaccttgaaaaagagtcgcagtttactcatgaaaaatggatggatgacagcactctgaaagagttcatcaaacaatatatcgcagcgtctggcaatcaggtctattttacctggcaaggcggtgaacccactctggctggcctggattttttccgtaaagttattcactatcaacaacgctatgcagaccaaaaacgtatttttaatgcattacaaacgaatggcattttattgaataatgaatggtgtgcctttctcaaagaacatgaatttctggttggtatctcgatcgatggcccccaggagttacatgaccgttacagacgcagtaattcaggtaacggtacttttgcaaaagtgatagcagccatcgagcgtctgaaatcatatcaagtagagtttaatacgttaaccgtcattaataacgttaatgtccattaccctcttgaggtttatcattttttaaaatctatcggcagtaaacatatgcaatttatcgaattgctagaaaccgggacgccgaatattgatttcagtggtcatagtgagaacacattccgtatcattgatttttctgtgcctcccacggcttatggcaagtttatgtcaaccatttttatgcaatgggttaaaaacgatgtgggtgaaattttcatccgtcagtttgaaagctttgtcagccgttttttggggaatgggcataccagttgtattttccaggagtcctgcaaggataatctggttgttgaaagtaatggagacatttacgaatgcgaccattttgtctatccacagtacaaaattggaaacattaataaatctgaactcaaaacgatgaacagtgtacaactgacagcgcaaaaaaaacggatttcagcgaaatgtcagcaatgtgcatataaacctatctgcaatggcggttgtcctaagcatcgtattactaaagtaaacaatgagactgtttcttatttttgcgaaggttataaaatccttttttcaaccatggtaccttatatgaacgccatggtagagttagctaagaacagagtaccgctttaccacattatggatgttgcaaaacaaatggagaataattaataacgctctcttttaactccattcttagcctccttcttatgaccttaacaaggcacccgacataaattcctgtcgggtgtttcgtcatcatcatcttcccttgcgaaaatcctggcttacgtggtatgcatcagggcattagcaatatccttgattatcaatagcataaccataaccactgaaaatgaaatattcctttatatttcatattgttaaatgatacttaaataaatttcatcagtaaatcattgccatagataatcattggatggcacaatcaattttcgctaatgataaccattcccattacgcttcgtatgttgatagcaaagtatctctgtctgttgaagcccttttggctgcgtaagaataataaaacttcagtgttgttaatcattattatcctcgccatgatccttggcgtggttaaaattcaggtctggttaaacgactggaataatgattttttcaatgcgctaagccagaaagaaaccgataagctttggcagcttgtcctttggttccctgccctgctggggatctttgtattaatatccgtaaacaaaacatggttaattaaactactgactattcgctggcgcgaatggttaacagattactaccttaatcggtggtttgcagataaaaactactacttcacgcagatctacggcgagcataaaaatacagataaccctgaccaacgtatcgctgaagacattctcttactgatcagcaaaacgctcagtctttcatttggcttcatccagtcacttagcatgctgatcacctttaccgttattctttgggaaagcgcgggtacgctctcattcactgttggtggaacagaatggaatatccaggggtatatggtctataccgtcgtgctcattgtgatcggtggaactttatttacccataaggtgggtaaacgtattcgtccgcttaatgtggaaaaacaacgtagcgaagcgacatttcgaacaaatcttgtgcagcataataagcaggcagaactgattgcgctaagcaatgctgagtctctacaacgccaggagttgagcgacaattttcataccattaaagagaactggcatcgtttaatgaatcgtcagcggtggcttgattactggcagaatatttattcgcgctcgcttagcgttcttccctactttctgttattgccgcagtttattagcgggcagatcaatctgggcggactgatgaaatcgcgccaggcatttatgctggtatcgaacaatttaagctggtttatttataaatatgacgaacttgctgaactggctgcggttatcgatcgcttgtatgagttccatcaactcactgaacagcgccctacgaataagcctaaaaattgccaacatgcggtacaagtggctgatgcgagtattcgtacgcctgataataagatcatattagagaacctgaactttcatgtttcgccaggcaaatggctattactgaaaggctactctggtgcgggaaaaaccacactgcttaaaacattatcccactgctggccgtggtttaaaggtgatatttcttctcctgctgacagttggtatgtgtcacaaacaccgttaatcaaaaccggcttactgaaagagattatttgtaaagcacttcccctgcccgtagacgataaatcgttgagcgaagtactgcatcaggttggtcttgggaaattggctgcgcgtattcatgaccacgatcgctggggagatattctttccagcggcgaaaaacaacgtatcgccctggcacgattaattttacgacgtccgaaatggatatttcttgacgaaactacctctcatcttgaggaacaagaggctatccgcttactgcgtttagtgcgtgaaaaactacccacaagcggcgtcattatggttacacatcaacccggtgtctggaacctggccgatgatatttgtgacattagcgcggttttataaaaacaataaaagccctgctgtacggagatataaataaatgaagcgagttcttattcctggcgtcattttatgtggcgctgatgtggcgcaggccgtcgatgacaaaaacatgtacatgcatttttttgaagagatgacggtctatgctcctgtccctgtacccgtaaacggcaacacgcattacaccagtgaaagcatcgagcgtttaccgaccgggaatggcaatatcagcgatctgctgagaaccaaccctgcggtacgcatggattcaacgcaaagtacctcgttgaaccagggagatattcgccctgagaaaatctctattcacggtgcgtcgccctaccagaatgcctatttgattgacggtattagtgcaactaataacctgaacccagcgaatgagtccgatgccagtagtgcaaccaatattagcgggatgtcacaggggtattatcttgatgtcagcttactggacaatgtgacgctttatgacagttttgtgccggttgaatttggtcgcttcaatggcggggtaattgatgcaaagatcaaacgcttcaacgctgatgatagcaaggtgaaattgggttatcgcactacgcgttcggactggttaacatcgcatatcgatgagaataacaagagcgcatttaatcaaggctcttcaggaagtacttattactccccagattttaaaaagaacttttataccttgtcgtttaatcaggaactcgctgataacttcggcgttaccgccggtttatcgcgccgccagtctgatatcacccgcgcggattatgtttcgaatgacggcattgtcgccggtcgggcacagtataaaaacgttatcgatactgcattaagcaaatttacctggtttgccagcgaccgctttacccacgatttaaccttaaaatataccggctccagccgtgattataataccagcaccttcccgcagtctgatcgcgaaatgggtaataaatcctatggtctggcatgggatatggatacgcagctcgcatgggccaaactgcgtaccaccgttggttgggatcatattagtgattatacccgtcacgatcatgacatctggtacaccgaactttcatgtacatatggtgatattacagggcgttgcacccgtggcggattaggacacatttcccaggctgtagataattacaccttcaaaacacgcctggactggcaaaaattcgccgtgggtaatgtttcgcatcaaccctacttcggcgcggaatacatctattccgatgcgtggactgaacgccataaccagtctgaatcctatgtgattaatgctgccggaaagaaaactaaccataccatttaccataaaggtaaaggccgcctgggaattgacaactacacgctgtatatggcggatcgcattagctggcgtaatgtgtcattaatgcccggcgtgcggtatgactatgacaactatctgtcaaaccacaatatctccccgcgctttatgacggaatgggatatttttgctaatcaaacctcaatgattacagcaggttataaccgttactatggcgggaatattcttgatatgggattacgtgatatccgcaatagctggacggaatcggtatcaggtaataaaactctgacgcgttatcaggatttgaaaacgccttataacgatgaactggcaatgggattgcagcagaaaatcggtaagaacgttattgcgcgtgcaaactatgtttaccgtgaagcgcatgatcaaatcagcaaaagcagtcgtaccgacagcgcgactaaaaccaccattactgaatataacaacgatggcaaaaccaaaacgcattcgttcagcctcagttttgaactggccgaacccctgcatatccgccaggtagatattaacccacaaattgtctttagctatatcaagagcaagggcaacttgtcgttaaacaatggttatgaggagagcaataccggtgataaccaggtggtttataacggtaatctggtctcttacgatagcgttccagtggcagattttaataacccattaaagatctccttaaacatggatttcacgcatcaaccgagcgggttagtgtgggcgaatacgctggcctggcaagaagcgcgtaaagctcgcattatccttggtaagacaaatgcgcaatacatcagcgaatattcagattacaagcagtatgttgacgaaaaactggatagcagcctgacctgggacacccgcttgtcctggacgccacaatttctgcaacaacaaaacctgacgatcagtgccgatattctcaatgtactggatagcaaaaccgctgttgatacaacgaacaccggtgtggcgacctacgccagtggccgtactttctggcttgatgtcagcatgaaattttaatagttcggattttacttaaccgggtaaattcgcccggttttcgcatggagataattatgagaaacctctgtttcttactgacgttagtggcaactctgttgctccccgggcggctgattgccgccgccttaccgcaggatgaaaagttaattaccgggcaactggacaatggcttgcgatatatgatttatccgcatgctcatccaaaggatcaggtaaatttatggctgcaaattcataccggttcattgcaggaagaagacaatgagcgcggcgtggctcattttgtagaacatatgatgtttaacggcacaaaaacatggccgggtaataaagtcatcgaaacatttgagttaatgggcctgcgttttggtcgcgatgttaatgcctataccagctatgacgaaacggtgtatcaggtgagtttgccgactacgcagaaacaaaatctgcaacaagtgatggcaatcttcagtgaatggagtaatgccgcaacctttgaaaaactcgaagtagacgctgaacgtggcgtaattactgaggaatggcgtgcccatcaggatgcgaaatggcgcacctctcaggcgcgccgccctttcctgctggcaaatacccgtaatttagaccgtgaacctatcggcctgatggatactgtcgccacggtcacaccggcacaattgcgccaattttatcaacgctggtatcaaccaaataatatgacctttatcgtggtcggcgatatcgacagtaaagaagcgctggcgctgataaaggataatttaagtaagcttccggctaacaaagcagctgaaaatcgcgtctggccgacaaaagccgaaaaccacctgcgctttaatatcattaatgataaagaaaaccgggtgaacggcatcgcactctattatcgcctgccaatggtacaagtgaacgatgagcaaagctttatcgaacaagctgaatggagcatgttagttcagctgttcaatcaacgtctgcaggaacgcatacagtcgggcgagttgaagactatttctggcggcactgcgcgcagcgttaaaattgcacccgattatcagtcgctgtttttccgtgtaaatgcacgagacgataatatgcaggatgctgcgaatgcattaatggcagagttggcaaccattgatcagcatggtttttctgctgaagaactcgatgatgtcaaatctacccgcctcacctggctgaaaaatgcggttgatcagcaagctgaacgtgatttacgtatgctgaccagtcgcctggcatccagctcattaaataatacgccgttcttgtcgccggaagagacatatcaactttcgaaacgtctgtggcagcaaattaccgtgcaaagtctggcggaaaaatggcagcagttaagaaagaaccaggacgcattttgggagcaaatggtaaacaatgaggttgccgccaaaaaagcattgtctcctgcggctatcctggcgctggaaaaggagtacgccaacaaaaagctggcggcttacgtcttcccaggcagaaatttatcgttaacagtagacgcagacccacaggcggaaattagcagcaaagaaacgctggcggagaatctgacatcattaacactttccaatggtgccagggttattctggcaaaatccgcgggtgaagagcaaaagctacaaattattgccgtatcgaataaaggcgatttaagtttccctgcgcagcaaaaatcacttatcgcgctggcaaataaagcagttagcggaagcggcgttggcgaactctcctcttccagcctgaaacgctggagtgcggaaaattcggtaaccatgagcagtaaagtcagtggcatgaatacgttgctctccgttagcgcgcggactaataaccctgaacctggttttcagttgattaaccagcgaatcacccacagcacgattaacgataatatttgggcatcgctacaaaatgctcaaattcaggcgttgaaaacgctcgaccagcgtccagcggagaaattcgcccagcagatgtatgagacgcgctatgctgatgaccgcacgaaattactgcaagaaaatcagattgcacagtttactgccgcagatgcgctggctgccgatcgccaattgttttcatctccagcggatatcacgtttgtcattgtcggtaatgtcgcagaagacaaactcgtggcgttaattacgcgttacttaggatcaatcaaacactctgattcgccattagccgcaggtaaaccattaactcgcgcgacggacaacgcatcggttactgtaaaagaacaaaatgaacctgtggcacaggtttcacagtggaagcgttatgattcccggacacctgttaatctgccgacgcgtatggcgctcgatgcttttaacgtcgcactggcaaaagatctacgtgttaatattcgtgaacaggcatctggagcatacagcgtttcttctcgcctctcggttgatcctcaggccaaagatatcagtcatttgctggcttttacttgtcaaccagaacgacatgatgaactgttaacgttagcgaatgaagtgatggttaagcgtctggctaaagggatcagtgagcaagaactgaatgaataccagcaaaacgttcagcgcagcctcgatatccaacagcgtagcgttcaacaattagcgaacactattgtaaatagtcttattcaatatgacgatcctgcagcatggactgagcaggagcaattgttgaaacaaatgacggtagagaatgttaacactgccgttaaacaatatctttctcatccggtaaatacttataccggagtattattgccaaaataataacagccccgtcaacacatcgttggcggggattttagcaatattcgctatttttatgtaataattttataaatgcgttcaaaataataatcaagtactaatagtgatattttaaggtctgatttttacgtgataattcaggagacacagaatgcgcataaaaataacagcataaaacaccttaccaccacccaagaatttcatattgtattgtttttcaatgaaaaaatattattcgcgtaatatctcacgataaataacattaggattttgttatttaaacacgagtcctttgcacttgcttactttatcgataaatcctacttttttaatgcgatccaatcattttaaggagtttaaaatggataagaagcaagtaacggatttaaggtcggaactactcgattcacgttttggtgcgaagtctatttccactatcgcagaatcaaaacgttttccgctgcacgaaatgcgcgacgatgtcgcattccagattatcaatgacgaattatatcttgatggcaacgctcgtcagaacctggccactttctgccagacctccttctgcaccagaaataacggcacaaatagtcaacagtagaatatccgataatttatgttccactttccagggttgtctgtaatcggggataatagaaatatgttccatcaattttttaagttccattttgttctccttaattatgtaagaagtatttgatcatgtataagcaataaaaaacagcttcaggtaataaggaatatctcaatttttaaacataaaatgcgaattatttagtacaaaaagtgaacttctgatgatctttccctggttaatatccaggcatcatgttacgtgacatggtgtagctattgaaaaactacgttagcggatatttgtttgcctccttttttttacccagcataccccatcccaacaatttgaattaaatgtcgtaaaattgataacttctttaccttttgaaaaatatgttattgggcaaaactcatctccacttaatggtttaaagctggttattatgtcacaatttaattgttgtgatagtgattgagcgatgaaatcagttagagatggaagatacttgctttcaatcgatgttgttgatgtgccgaaatcaacttcataagaaaaatcaatcttcgctagtaattcaatatattctgcatctttgtcaataaaagatgtgtcataagtaatgtttttttatactcatttacatcaaagtagtcatattttaatatcgaaaagtcaatgtctagagcatttacaaacttataaatactatcggttagtttacttttatctttatactctatgagtatacttgatttggtgatcatatttttaaaatctccaaaaaggttctaaaacggattgatcaatcacttcaactcgagctgttgaattattaggtttgaagtttccaaagaattcatgaaattcctcaagtgtatttttggaattggaacttctaattaccaggacgataccattatctcccaccaggccaactcccttgttaacattttttacctcatgatatacctcatataatgtagcattatttctaagataaaaattacgaagttcattgttaaaagatgggtattgtcccgttctacatattggattaatctttttttatttctttttgtaataaggccaatgcacactcgccagcaataatttcatcaaataagtattccaatgttcctcttaacactaaagcacgacaatcattttccgtagtgcgtttaataaataactctttttcaatatataactcttgcataacttcagaatttgaagatagtaattggcagcggcatgggaactcaagatgttcattgtataaaacgctaaaaactatgtttcccgcaataataaatatatcttttatcggcagaattatattcatcacaaccccttgtctttcaatattttgagtattgctacatcctcatcagataacccaagcatttttttgtgtcttatcatgaaatccttaacgtgcgtttctgcactccctagtccataacgtcctaatttttcagctattcctagtttctcttgtgtaccatgtaaaaactcttcaagaatagcggctttactcggatttgaacgaacaataatcgtcatgtctaataccgaagcttcggctccaaaatgttcaagcattctgaattcatctgagcctggtaatgctattattaaatgtcttttccgcgatatagccgccagaagttctggggctgccttctcaaccccatgagatcactggagctattcatcattttagataatgaagctcctttatttaatcctaagggatctatccatcttaaaggattcggcacataccggtaagtctgctcccctccctgcaaccccagtggatcactcaccaggtacatcccggtttccggctcgtaataccggaaccggttatagcacagcccggattccacatcctgccactgccccgcatacagcaggccaggggcggcttccgggtccagttccccgcgcgggtccgggtagccggtgtctgcgggcaggctgagtgccagcccccacaggctggtctgtcccggccgccagacggttttaccttcactgttaaagagcatcagcgggcggcccgtcaggtcgctcaccgcatgattcgtccgcgtcacccactgcggggccaccgacggatgcgcctgccgtacccggctgaactgctggcttatcagctcaaagccgttaaacaccaggtgccgtacgctgtacagtttatcatcgcggtattcccggatttccgcaatactgtcgccgtcccacaggtacgtgaagcggattttcttccggtcgcagcgtttctctgttcgtctgccgctggcgtcgtggcggtattcccactgctcaccctgtgcgctgcaatacccggtcagctggtcccggctgtcccaccggaaccgctctgtttccgggcggtagccgtcacggtgtctggtgcggctgaccatccggcctgcggcgtcatagtcatactgcgtgtttccggcctgtttcagccggtggcctccggcatactggtcagtctcttcacttatccggtgcctgcccgcagactgcgccttcaggtagccacaactgtcatagccataggactcatcgccttcgccatagcccagcccggtgcctgaggctgtcaccgccgtgacctggccgttccggtccagccggtattcccgccgtgtttcccgtccgtaatcttcccggctggtgacagccgacacattgcccgcgctgtcgtaacggtactcccgtaccagtgaggggagcagcccgccccatgtggtttcctccgggaaaaatccggcgcgctgggtgacaagctggctggctgcattccagccctgctcacaggcaaaaccccggttactgtgccggaacacttcacgtctcgcctcatcacggctgaacgtcagcgtctcatcccccggcagaatgacctccgtcagttctccggcggcgttataacggtacgtggttttcagcagggattcatcggggtgtctgtcgcgttcatcttccggtggcaggatacagcggataacggtgtgttcatcggggtagtggtattcaatggcccgtcggccctgagtggtgacattcacccgcccgcgttcgtcatagccggtgcgctgtgatgtgccgtccgggctgaagatacccgtcagcctgccggatttgtcataggcatactgcgttttgccttccggcgtgatgacttctgccaggcggcctgcggcgtcccggctgtagaggatagtttcctccaggccgttaaccctggcggtacacaggccatcggcgtcatagcggtaacgccagaccacgccgccccagtcatgctcttccgtcacccggccacagttatccagaacataaaggtatgattcgccctgcgggttaatgacttctgtcagttgcagcgtgtctttatcgtagcggtactgccagcggtggccttcaccgtccgttcgcgccaccggcaaatcgaacgggccgtattccattgtccagacaacgccgttaccgtccgtgtacgccagcaggttgccgtggcggtcatagcggaatccttctgcgccggtttctgcccgctcaaggccgctcagtttatggtgctgctgccactgtaaccgcactgactgaccgccggggccgcgcatcttcaccggcaggtcgtgaccgctgtattcggtatggtgttcacggcccatcacgtcggtgagtgtttccggccggttgtggtggtcgtactctatgcccagacgccgttcatcctggcggaatattcccgacaacagcccctgagcggtgtacgccagccgggtctcttcgccctgtggcgacaccaggcttaccggcaggccgcgttcatcgcacagctgtgtccacgtctgcccggcagggtcggtgatgttgctgagcaggccgcgctcatcatagcggtacaaccactccgcgccgtctgccgccgtgtaacggcttaactgaccgtgtgcggcgttgtattcaaacttctccacccgcccggtaccgtacaactgcggataatgtgataagcgggacgacttcagacgttattagggaaggaacagaaaatgctatggttatgtgagaattttgtttaaatattactttacagaaacgggtgtctgttcagtcaaaaaaataatcacaagctcaacctcttgtttcttggcgttattcaggacaggtacgcatatcacaacgagtaacaaaaacgtaaagttaaaccaatattcataatatatttttattcacagcaataaataatccaattaacattattaaaatgaatgattgcataagaaatatatgctaccgctccaccctgataacatgatctgcacattgcacatcttaacgttgttaaatactggctcaatagtggatattttaaattaggaatttatcaaattcacttgataaatagattgagtgaataatataacaattaatgatgattaatcgcgattaaattattcattgctttatatgatagatggcttgtttataacgatgaaaatttagaaagggcattgtgatctacaattggaagaaacacagatttaactaagtttcatatacaaacatctcgtgaaactttgaaaaataaaagccttcgatatttcatatgtttaataagtttttctctaatttgttgatcaacaataccaggaggtgatgcaccacgccctgaatttgaacttaataatcactctctctccggcagcataatcacaaaccttgtcccccgcgcatctgacgttaccgcaaccgtgcctttatgcgcgacaacaatcgatttcactatcgccagcccaataccgctaccttcaccttttcgctggcgggaagggtcaacgcgatagaaacggtcaaacaatcgcggtaagtgctcgggcgcaatgggcgtaccggggttttcgacggaaacttgcacctgatgattgaccgtctggcagcgcactacaatagcctcactgggtggcgtataacgcagggcattagaaagcaggttgcttaacgcccgacgcagcatcagcggatcgcccgcaacctgacatttgtcgccaacaaatcgcaactccacgccgcgatcttccgctaacgcctcgaaaaaatcgaacactttgccgacttcatccgccaggttgagcattttcttttcggggattagctggttgttatcggcctgagcgagaaacagcatatcgctgaccattttcgccattcgcgtcagctcttcgagattagagtagagcacatcttccagctccttctggctgcgagactggctgagggcgatttccgtttgcgtgatgagattggtaatcggcgtgcgaatttcgtgagcgatatccgctgagaaattggactggcgggtaaagacatcctcaatacgctcgatcatatggttgaacgacagtaccagctgttccagctcaatcggcacggtctgcgggtcgaggcgaacgtcgagatctttcgaggtaatattctggatttgacggctgacgctgcggatcggcgcgtgacctttatgtaccgccaacagtacgataaagacgatcaggatgctgattaccgatgcggtcataataagtttattcatcaaatcatttatgtaatgaagatgaaaatcgatcgaaagcgcgatgtagagcgtataaatcggtttgccgtccaccaacgggccaaccggcaagttaatcatccgccagttgctgtgttccatatgcccgtgaccgtggcctggcatcatcatcgtcgggccggaaaggagatacacctcgccaccctgagcgtctttatcgggtatggcgtcacgcgtaaactcgcggatatccggcgcaccgggggagtgatacaccgttttaccctgactatctgccagggaaatcaacacattggaataaccactgacgatatcttccagcgtcattaagcgtcgggcttgcgtttcgtcagggtgatttagtacccgttcaagggtggcgctaatctcttttaaatcattaatatcctgctcggcaaaatgaacttttactgagtggatcatgatccatgcaaaggcgaaaaacgccgcgatggtggccaggctgataaaaaaggtcaggcgggttgccagcgaaaacgggcgctgaaatggcttactgaccatccggcacctcaagcatgtaacccacgccgcgcacggtctgaattagcttcggctcaaagtcgttgtcgattttgccgcgcagccgcttcaccgccacatcaatagcattggtatcgctgtcaaaattcatgtcccatacctgcgaggcgataagcgagcggggcagcacttcgccctgatggcgaaggaagaactccagcagagtaaactctttactggtcaaagtgatgcgcgtgccgctgcgggtgactttgcggctgacgagatcgaccatcaaatcggcaacctgaaactgactttcgataatcaccgccgccccgcgccgcagtaatgtgcgcacccgcgccagcagttcagcaaaagcgaatggcttcaccaggtagtcatctgcccccaactccagccccttgacgcgatgttcaatggtgccaagcgcggtaagcaacagaatcggcatccctttattggcggagcgtaacatgcgcacgatatcccagccgttcacgtccggcagcataatatcgaggattatcagatcataatcaccggtcatcgccagatggtagccattcagcccgttgtcggccaaatcgaccacaaaaccggcttcggttaaccctttggtcaagtattctccggttttcttttcatcttcgacaatcaacagtttcatatttcctccgcatgttgcccgggcaattctagagtagcgggatcagatggcaatcgcttattggcaaaatgacaattttgtcatttttctgtcaccggaaaatcagagcctggcgagtaaagttggcggcataaaatcaccagaaattatgagcctatgtctccttgtaaacttctgccattttgtgtggcccttgcgctaaccggttgttcactggcaccggattatcagcgtccggcaatgcccgtgccgcagcagttctcactcagccagaacggcctggttaacgcagcagataactatcagaacgcgggctggcgcaccttttttgttgataatcaggtgaagacgctgattagcgaggcgctggtgaataatcgggatttgcgcatggcgacgctgaaagtgcaggaggcacgggcgcaatatcgtctgaccgatgccgaccgctacccacagctcaatggcgagggcagcggcagctggagcggtaatcttaaagggaataccgccacgacacgggagttttcgaccggccttaacgccagctttgacctcgattttttcggtcgcttaaagaacatgagcgaagccgagcgacaaaattatttagccactgaggaagctcagcgcgcggtgcatattctgctggtttctaatgtcgcgcaaagctatttcaatcagcaactggcgtatgcgcaattgcaaatagccgaagaaacgctgcgtaattatcagcagtcatatgcgtttgtcgaaaaacaactgttgacaggtagcagtaatgttctggcgctggaacaggctcgcggggtgatagaaagtacccgcagcgacatcgctaaacgtcagggggaactggcgcaggcgaataatgcattgcaactgttgctgggaagctacggcaagctgccgcaagcgcagacagtaaacagcgacagcctgcaaagcgttaaattaccggcgggattgtcgtcgcaaatcttattgcagcgcccggatattatggaagctgaacacgcgttaatggcggctaatgccaatattggcgctgcacgcgcggcattttttccgtctataagcctgaccagcggaatatcgaccgccagtagcgatctatcgtcattatttaacgccagcagcgggatgtggaattttatacccaaaattgagatccccatttttaatgccggacgcaaccaggccaatctggatatcgccgaaattcgccagcagcagtcggtggtgaattatgaacagaaaatccagaacgcctttaaagaagtggcagatgcgctggcattacgtcaaagcctgaacgatcaaattagcgcccagcagcgttatctggcatcgctgcaaattactttgcaacgggcgcgggcattatatcagcacggcgcagtaagttatctggaagtgctggatgccgagcgttctttatttgcaacccgacaaactttacttgatctgaattatgcccgtcaggttaacgaaatttctttgtataccgcacttggtggcggttgacagcaatatactcgtcatacttcaagttgcatgtgctgcgtctgcgttcgctcaccccagtcacttacttatgtaagctcctggggattcactcgcttgtcgccttcctgcaactcgaattatttagagtatgacttttaactccaggagagaataaatgaaaaaagcactgcaagtcgcaatgttcagtctgtttaccgttattggctttaatgcccaggctaacgaacatcatcatgaaaccatgagcgaagcacaaccacaggttattagcgccactggcgtggtaaagggtattgatctggaaagcaaaaaaatcaccatccatcacgatccgattgctgccgtgaactggccggagatgaccatgcgctttaccatcaccccgcagacgaaaatgagtgaaattaaaaccggcgacaaagtggcgtttaattttgtccagcagggcaacctttctttattacaggatattaaagtcagccagtaacccaggtttaatgagatgaaaaaaatcgcgcttattatcggcagcatgatcgcgggcggtattatttctgcggcaggttttacctgggttgcaaaggcggaaccgcctgcagaaaaaacgtcgaccgcagaacgtaaaatcttattctggtacgacccaatgtatcccaatacgcggttcgataaaccaggtaaatcgccgtttatggatatggatctggtgccgaaatatgccgatgaagagagttctgcgtctggtgtgcgcattgacccgactcagacgcagaatctgggggtgaaaacggctaccgtcacgcgcggaccgctgacttttgcccagagtttcccggcgaatgtcagttacaacgagtatcagtatgccattgtgcaggctcgcgctgccgggtttatcgacaaggtgtatccgcttaccgtgggcgataaagtacaaaagggcacaccgcttctcgacctgaccattcctgactgggtggaagcgcagagtgagtatttactgctgcgcgaaaccggcggtacggcgacccagactgaaggcattcttgagcggctgcgactggcgggaatgccggaggcggatattcgccgcctgatcgccacgcaaaaaatccagactcgctttacgctcaaagcgcccattgatggcgtgatcaccgcgtttgatctgcgcgcgggaatgaatatcgccaaagataacgtggtagcgaaaattcagggtatggacccggtgtgggtcactgctgcgatcccggagtctatcgcctggctggtgaaagatgcctcgcagtttaccctcaccgttccggcgcgaccggataaaacactcaccatccgcaaatggacgctgctacctggcgtggatgccgcgacccgcacgctgcagctgcgtctggaagtcgacaacgccgacgaggcgctaaaaccgggcatgaacgcctggttgcaactcaacaccgccagcgaaccgatgctgctcattccgtcacaagcgctgattgataccggcagcgaacagcgggtgattaccgttgatgccgacgggcgctttgtaccgaaacgcgttgctgttttccaggcatcgcaaggcgtcaccgcattacgctctggtctggcggaaggtgaaaaggtggtttccagcggcctgttcctgattgattccgaagccaatatttctggcgcactggagcggatgcgctctgaaagtgctacccatgcgcattgagggaataaccaatgattgaatggattattcgtcgctcggtggcgaaccgttttttggtgctgatgggcgcgttgtttctgagcatctggggcacctggaccatcattaatacgccagtggatgcgctgccggatctctccgatgtgcaggttattattaaaaccagctatcccggtcaggcaccacaaatcgttgaaaatcaggtgacttatccgctaaccaccaccatgttgtcggtgcctggcgcgaagactgtgcgcggtttctcacagtttggcgactcttatgtgtatgtcattttcgaagatggcaccgatccgtactgggcgcgttcgcgggtgctggagtacctcaaccaggtacagggtaagctgcctgcgggagtcagcgccgagctggggccagatgccacgggtgttggctggatctatgaatatgcactggtggatcgcagcggtaagcacgatctggccgatttacgctcattacaggactggtttctcaaatatgagctgaaaaccatccctgacgttgcggaagtggcgtcggtgggcggtgtggtgaaagagtatcaggtggttatcgatccccagcgcctggcgcagtatggcatcagtctcgccgaagtaaaaagcgcgctggatgcttcaaaccaggaagcgggcggttcgtcgatcgaactggcggaagcggaatatatggtgcgcgccagcggctatctgcaaacgctcgacgactttaatcacatcgttttaaaagccagtgaaaatggcgtgcccgtttatctgcgcgatgttgcgaaggtccagattggcccggagatgcgccggggcattgccgaactaaacggcgaaggcgaagtggcgggcggggtggtgatcctgcgatccggcaaaaacgcccgagaagtgatcgccgccgtgaaggacaaactggaaacgctgaaaagtagtctgccggaaggcgtggagatagttacaacatacgatcgcagccagctcattgaccgcgccatcgacaacctcagcggcaagttgctggaagagtttattgtggtggcggtagtctgtgcgctgtttctctggcatgtgcgctcggcgctggtggcgattatttcgttgccgctggggttgtgtattgcttttattgtcatgcacttccagggactgaatgccaatattatgtcgttgggtggcattgcgattgccgtcggggcgatggtcgatgctgctatcgtcatgatcgagaatgcgcataaacggctggaagagtggcagcaccagcatcctgacgccacgctggataataaaacgcgctggcaggtgatcaccgatgcgtctgttgaagtggggccggcgctatttatcagtctgctgattatcacgttgtcgtttatcccgatcttcaccctggaagggcaggaagggcgtctgtttggcccgttggcgttcaccaaaacgtatgcgatggcgggtgcggcgctgctggcgatcgtagtgatcccgatcctgatgggctactggatccgtggcaaaattccgccggaaagcagtaacccgctcaatcgctttttgattcgtgtttatcatccgctgttgctgaaagtactgcactggccgaaaaccacgctgctggtggcggcgctttcggtgctgacggttctctggccgctcaataaagttggcggggaatttttaccgcagatcaatgaaggcgacttgttgtatatgccatcgacgctgccggggatttccgcagcagaggcggcgagtatgctgcaaaaaaccgacaagctaattatgagcgtacctgaagtggcgcgggtatttggcaaaaccgggaaagcggaaaccgccaccgattctgctccgctggagatggtagaaacgaccatccagcttaagccgcaggagcagtggcggccaggcatgacgatggacaaaatcattgaggaactggataacaccgtgcggctgccggggctggcgaatctgtgggtgccgccaattcgtaaccgtatcgatatgctctcaaccggcattaaaagccccatcggcattaaagtttccggcactgtgctggcggatatcgacgcgatggctgagcaaattgaagaagtagcgcgaacggtgccaggcgtagcttctgcgcttgccgagcggctggaaggtgggcgctatatcaacgttgagattaaccgtgaaaaagccgcacgttacggtatgacggtggcggatgtgcagttgtttgtgacttctgcggtgggcggggcgatggttggcgaaacggtggaagggattgcccgttatccaattaatctgcgttatccgcaaagctggcgcgatagtccgcaggcactgcgccagctgccgatcctgacgccgatgaagcagcaaatcaccctggcagacgtggccgacattaaagtctctaccggaccgtcgatgctgaaaaccgagaatgcgcgcccgacgagctggatttatatcgatgcccgcgatcgtgacatggtgtcggtggttcacgatttgcaaaaagcgatagctgaaaaagtgcagttaaaaccgggcaccagcgtggcattctccgggcagttcgagctactggagcgcgccaaccataagcttaaactcatggtgccgatgacgttgatgattatcttcgtgctgttgtatctggcgttccgtcgggtgggcgaagcgttgctgattatcagcagcgtaccgtttgcgctggtgggcggcatctggttgctgtggtggatgggctttcatctttccgtggcgacgggcactggctttatcgccctcgccggggtcgccgccgaatttggcgtggtgatgctgatgtatttacgtcacgccatagaggccgtgccgtcgttgaataatccacaaacattcagcgagcagaagctggatgaggcgttatatcacggcgcggtcctgcgcgtgcgcccgaaagcgatgacggtggcggtgattatcgccggtctgctgccgattctgtggggaacgggggctggttcagaggtgatgagccggattgccgcgccgatgattggcggcatgatcaccgcacctttgctgtcgctgtttattatcccggcggcgtataagctgatgtggctgcaccgacatcgggtacggaaataaaagcaggataccccgtttaaccgtgtggattgtgtcttgcgacgatgggcactaaatgttaaaaggtgcccctcaacaaaaaagacacacaggggaaaggcgtgaaaaacgcgtcaaccgtatcggaagatactgcgtcgaatcaagagccgacgcttcatcgcggattacataaccgtcatattcaactgattgcgttgggtggcgcaattggtactggtctgtttcttggcattggcccggcgattcagatggcgggtccggctgtattgctgggctacggcgtcgccgggatcatcgctttcctgattatgcgccagcttggcgaaatggtggttgaggagccggtatccggttcatttgcccactttgcctataaatactggggaccgtttgcgggcttcctctctggctggaactactgggtaatgttcgtgctggtgggaatggcagagctgaccgctgcgggcatctatatgcagtactggttcccggatgttccaacgtggatttgggctgccgccttctttattatcatcaacgccgttaacctggtgaacgtgcgcttatatggcgaaaccgagttctggtttgcgctgattaaagtgctggcgatcatcggtatgatcggctttggcctgtggctgctgttttctggtcacggcggcgagaaagccagtatcgacaacctctggcgctacggtggtttcttcgccaccggctggaatgggctgattttgtcgctggcggtaattatgttctccttcggcggtctggagctgattgggattactgccgctgaagcgcgcgatccggaaaaaagcattccaaaagcggtaaatcaggtggtgtatcgcatcctgctgttttacatcggttcactggtggttttactggcgctctatccgtgggtggaagtgaaatccaacagtagcccgtttgtgatgattttccataatctcgacagcaacgtggtagcttctgcgctgaacttcgtcattctggtagcatcgctgtcagtgtataacagcggggtttactctaacagccgcatgctgtttggcctttctgtgcagggtaatgcgccgaagtttttgactcgcgtcagccgtcgcggtgtgccgattaactcgctgatgctttccggagcgatcacttcgctggtggtgttaatcaactatctgctgccgcaaaaagcgtttggtctgctgatggcgctggtggtagcaacgctgctgttgaactggattatgatctgtctggcgcatctgcgttttcgtgcagcgatgcgacgtcaggggcgtgaaacacagtttaaggcgctgctttatccgttcggcaactatctttgcatcgccttcctcggcatgattttgctgctgatgtgcacgatggatgatatgcgcttgtcagcgatcctgctgccggtgtggattgtattcctgtttgtggcatttaaaacgctgcgtcggaaataaggcattcacgctacatccgacaaaacgatgtccgctctcatccattcgatgagagcggtttttttaattactgcttaaatgcacccgccagagagcgaatatcattgccggttggcgactgatgaagtcgcagaccaaactcttcgacaatcgcaaatatgtgatcgaatatatcagcctgaatgctttcatattccagccacaccacggtgttggtaaacgcatagatctcgagcggtaaaccattatcacctggagccagttggcgtaccattaaagtcatatctttacgaatccgcggatggttacgcagatattcgttcagataggcacgaaaggttccaatattggtcattcggcgcaggtttaataccgactccgtagaaccttgctggcgattccactcattaatttcctgatggcggctggttaaataaggctttaacaaatgcgctttattcagacgttgcatttcgtcttcatcaagaaaacgaatactggtgacatcaatactgatactgcgcttaatacgtcgcccgccagatgctgacatcccgctccagtttttaaaggagtcagaaaccagagaccaggtgggaatagtggtaatggtattgtcccagttacgcactttgacggtggttaacccaatatcgatcaccgcgccatccgcgccgtatttcggcatctccagccagtcgcccagtttcagcatatcgttcgcggaaagctgaatacctgccaccagaccaagaatcggatctttaaataccaacatcagcacggcagccattgcaccaagaccgctgatcagaatcgctggcgactgaccaatcagcagcgagatcatcaaaatgccgaccagaatcgcgccgatcagtttaatcccctgaaatatccctttcagcggtaactgggatgctgccgggaatttctgcgccagattcaaaataacatccagcaacgagaagactgaaagcagcgcatacatcatgatccacaactgcgcgcaggtagtcagaatatctgccgcttcggtgcctttttgcagccagaataccgcctgaatattgacgataatcccctgcagggtaaaagctaaacggtggaagagtttattctgggtaatgatttgcaaccaaagccgtgaactggcgatggcacgtttttcgaaggtccgcagtaccacccaatgcaaaataatatgcaccacgacggcggtcagaaaaataataccgaaaatcatcaccatcgaggtggtgtgatcgatctcaatacccgctaaatcttcaacctgggatattaaatcctgcataacgtctcctttatacaacagcagcctatgatgacggctgaaacagggttatgcaaatcaggagaatctgaggggaaatagccgggcagatgcccggcaagagagaattacacttcggttaaggtgatgttttgcggcagacgagatttcggcagcgtagcgttaaaatcttcaacgctgtgatgacctaccggaacaaccaccagactggtgtagcctttctctttcagaccaaattctgcatcgaggatggcggcgtcaaaaccttcgatgggtaccgcgtccagacccagagccgccacgccgagcaggaagttaccgacgttgagataaacctgttttgccatccactctgcatcatcatgcagatctttacggtgcatatcggcgaagaacttgcgacctttatcgttcgcggctttcgcttccggcgtggcaaagcggccatcggcatcttcctggtcaacaaccagcttcagccaggcatcgtccatcgcagtttttgcacagaacaccacgacgtgcgaggcatcaagcattttacgctcgttgaacacgtaattaccggcagcggatttggcaacacgcgctttaccttcttccgtgctggcaacaataaaatgccacggctgggagttggtgctggatgggctgtattgcaggagagttttgatttgctcggcctgttccggggtaagttttttgctggcatcaaatgccttagtggaatgacgctttaaggcgacagaaatgatatccataaagactccatgtgtaagtaattttgcgtgccagcagattacaaggttcaacgagaaatggtaagcgagaaaaatgcgctatagatttccgctttagcctggacgcactcttttttgatcgcgtttagccagaccatcaaccaccagattccacgaatcgttgatcagatcgcgaagtaacgcttcggagatttcctcgccgggatacaccgaaatccagtgctttttattcatgtgataccctggcttaatgcttgggtatatttgctgatttaacagggatttttgtggatcggacttcagattgataaaggggacgccgcgtagctccgacgacagcataaaaatcttgccgccaattttaaaaacatcgaactccgggccaaaaggccagcaaagctcgacaaagggtaactcaagggccaggcgtttcgccgtttcgtgcagtgattgcttatccataaacgttcctttaggcgaaggagaataagcaaagtatgccgcgaagtacggcgataatcgacgtttaatccgccagcgagaaccagcgtcgccagataaagcgcagaacaaaatactcaatagcgcccagcactaaaaaccacagacaaaacaataaagtgtaaagctgactaagatccatcagatggaacgtggtcaccagtttttgtgccagcgtcagccccagtgcgggggcgggcagcagcaggcaagagaggaaagccatcagcaaaatgcctgctgcggtggtcaaggtttctaaagggtgtttcataacattgttaaatgtaagttaaaacaccattgtcagggatattcttctgtaaggcaattcccggcttagtcaccggcccagatctcacaatgctttttcaccaacccaatcagcgaaccgccatcggcgacgaaatcacgcatcagctgcgcttcattcagaccgctggcgacctggcgatgcagtgcttcaattgcgctcgatgcgccaattttatgtgcggaaggggcgattttttccagcaatcgcaaggtatcttccgttagcggtcgacgatcgccagtgtgcggatcggtaatgacaccttccagcccatagcgacaggcctggaaacggttgaatttatacagcaggtaatctttttcctgatgtttaaacgggcgttccgtcagtaaccagtgggcggtagcctgaattaatcccgccatatttaccgcgtggctaagggttaacggggtatccatcacccgaacctccaccgtgccaaaatgaggactggggcgaatatcccagtgcagatctttaatgctgtcgatcatcgtggtgtaactcagacagcgaaacagggcttcaaatagttgccagttactgacccacggcatcgggccattatcaggaaaggcggaaaaaatattcggtcgtgaggaggcaaaacgcgtatccgttccctgcatatatggcgacgcggcggaaagggcgataaagtgcggcacaaatcgtgacaagccgtgcagcaaataaatggcgtcatcgccactggcgcagccaacatggacatgctgaccaaaaacggtcgcctgctgaatgagataaccaaagttttccagcgtgcgttgatagcgttcgttatcgcatacctcctgacgctgccatttctgaaacgggtgcgtgccaccgccgcaaatttccagatgatggtctgtggctgcctgcaatacgactttctgcatcgctgaaaactgcccggcagcctggttgatatcacggcaaacatccgtcgccagctccagcatactttcggtgatatcgtgctttacctctccggccgtgatcttatttttaaccgcgtcaatcagcattgaagagtcctggcttaagtcatagcccggcggattaaccacctgcatttccagttcaataccgagggtaaaaggttcagaaacatgaaaatcgggtaatggcataggtttctcttatgttggcgttttctattcagtatagaagtcggagcggctgggcgagatgcggaagttctggaatgtttcttttttttggtgatggtgaactgatggtgcctgaagcaatttggctacttttgcaatgtgacaagttatggcagtgctgactggtggcgaagaattttgacgattgagtcatgcagaaaaaaacgggttcagcttcagttgattaaatgaggagtgagaagtccgaaacaggactcgctgtataaataaacagctattttgttgaggaagggtaagataacggcgggtgcctgaagctttccggtttcaggtttactctgaggtctggaaagatgaagccccaggagatatttctatcaaccctggggctgccactccaaacccgaacaatttggatggtagtcccttcttcgcatggaggcaatataaacatgctgacgaaatatgcccttgcggcagtcatagtgctgtgtttaacggtgctgggatttacgcttctggtcggagactcgctgtgtgagtttacggtgaaggaacgtaatattgagtttaaggctgttctcgcttacgaaccgaagaagtagccgttgtgcggggagtaatcccataagcgctaacttaagggttgtggtattacgcctgatatgatttaacgtgcttgtgatgatttttcctttaatatccagcatgttaataagttcagggatagctgtaatctcattagatttcttatccgtcttgatctgtccgatgaccagactgtgcattgttgagaacgcactaatgacatgaatcgctcccttacggcgactcttgtcataagaatgccggagtgtttttccatcaattgcgatgacgtctttatcatctgaagtatggcaatctcgcatccagttaataaagcactcgtgaaattttgaaggactgatacaggatacaactctggcgatggtatcgtgaacaggaataccattttcaaaatcaccatattgttttaaaaaatcgagatgtgtttccccaaaatcctctatatcttcccaaccttctgcaccagaaataacggcacaaatagtcaacagtagaatatccgataatttatgttccactttccaggcttgtctgtaatcggggataatagaaatatgttccatcaattttttaagttccattttgttctccttaattatgtaagaagtatttgatcatgtataagcaataaaaaacagcttcaggtaataaggaatatctcaatttttaaacataaaatgcgaattatttagtacaaaaaatcagcgttacgtgatctttccctgcccctgcgctcactaccatggctctttaccacagcagccggggttgtttgggaccgacttccgacagcagatcccggtgggcctgccaccatctcttcacaagcttatgcttattacatgcaaaacgtcccgttttgcatctttgtgcctacggcacaccggtgatctttccctgatgagggatatattaactattgaacattagcgcgaattatttagtgcaaaaaatcagcatcacgtgatgcttttcctgctattaataacctcctctatttaactatatttttcattgatgcaattcgtagatttgaagaagttcaactgccacatttttatttttactatcgcaatttttataccatacccatgcttccgtattttttactttttttaaatcatccataataaaatccccaccaaaaacagtaaaatacaatgtttcctcattaaaaataaaactcactgcccccccctcttttattttaatttccgcttcatttgtgttcaaatcaacttttttaattactccatgtaagttgggttttgatagtttttctacgccaccatcaggagcgggtaatatacatcgtttaagaactttagcatttgcacatccaataacccaaattagaatgcacactcccatgttaatcgcattaacgtgtcttaaaacgttcatatctaattctctctccaggatgcgaatacatccaacttgtcactttcttacacaactcatctacatcttcattctgtgcacgggtacatcccatagttggtttccagccttgtcgaggagcataaggatcgcgcaacgatgatcccccaccatgtagccatcttgctctagtatctgtagtatagatcttcgttgtgccatatgctgccgatattcctgattcatttgtctcacaaccaacgacttcacctgtatatggatcaccagcaccacgttgagaacgacgatcaattctattgctactatcaaaagtcattgaatcacctgtttcaggatcataataaatagtcactcctccagtcatatcagtaagaacaagaggagtttcagcacctgcccggtctggagcgggaggcccatatacacttataactcgttctaaccccagtggatcagtgtaacgtattggtaccagtggatacgtgtatagatttattccccccttcaaccctatcggatcctgggtgatataccgcccctgcaacggatcgtagtaccggtgacggttgtaatacagtcccgactcctcatcatactgctgccccggcaaacggtacggctggtacaggtgatgcgggttctcctcattaagctggttcccccactcgtcatactccccgcaccacgccgtttcgccttccggggtgatgagcgcctgcggcagtccacggtggtcacagtggtaaagatgcagcctccgctccgggatgtatgcatcctccatctgcgcggccatctgttccgccgtcagcccgcactgcgcaagccatgcctcactctccgcactcaccgctcccgcacgcagctcccgctccagccttcccagcatcaccgccagctccgccggtagcgtcacacccgtgtcctcctgcaacacctccgccaggctccggtgccgcgccttcgcctgttcgccattctctgtttcgattctcaggagcggcgtgaagctccccggctggtataccgtctggatacgcgtggtgccggtctgtatcgtcgtcagcctgtcaccgtcccacccgtaccatgtcacctccggtttacgcgacagcgacatccaccccgtcaggtcacgctcccgccgccatacccgttttcccgtccggcggcccagcgggtcatagaggtaccggctctccacctgtggttcgccgtgctgtatccgcgtgtagaacaccaggcggtgctggctgtcgtagtggtagtggtgggtccgctcgtcgtgcatccgtatcaccccttccgggatgcggtccgtcttctccgccagcctgccgtattcatcgtggcggtagacatagtgcgcatcttccgcgatgcggttagggccaacctttgaccaggtgtttacatctgccgatgacaacaaactggttgttccacagtttcttacccgttacggcctgcaaagctattttgtaaaacagcgcgatgaactggttgaactgacggcgatggattcctgggtacttaaccttacccgcagcgtgaaatacagtgacgccgaccgcgcggaaatccagcgccagttgaccgagcagtatatcagcgactacaccgccacctggcgggccgggatggacaatctgaatatccgcaattttgagtccatcggacaactgaccggggcgctggagcaggttatcagcggcgaccagcctttgcagcgggcgctgaccgtcctgcgtgacaacacacagccaggcgtcttttctgaaaaactctctgccaaagaacgggaggaagccctggcagagccggattaccagttactcacccgcctcgggcatgaattcgccccggaaaacagtaccctggcagtacagaaagacaaagaaagcacgatgcaggccgtgtatcagcaactcaccgagttgcaccgctacctgctggcaatccagaacgcgcctgtaccagggaaatcggcgctgaaagccgtgcagttacggcttgatcagaacagcagcgatccgatattcgccacccgccagatggcaaaaacgctgcctgctccgctcaaccgctgggttggcagactgactgaccaggcctggcatgtggtgatggtggaggctgttcattatatggaagtggactggcgcgacagcgtggtgaaaccgtttaacgagcaactggcaaataactatccgtttaatccgcgttctgcacaggatgcctcactggatgccttcgaacgcttctttaaaccggatggcatactggataccttctaccagcagaacctgaagctgtttatcgataatgacctgagtctggaggatggcgataacaacgtcattattcgcgaagatattattgcgcaactggaaactgcgcagaaaatccgtgacatcttcttcagcaaacagaacggtctgggaacatcctttgccgtggaaacggtatcgctttcaggcaataaacgccgcagtgtactgaaccttgacggtcagttagtcgattacagccagggccgtaactataccgcccatctggtctggcctaacaacatgcgcgaaggcaacgaaagtaagctgacgctcatcggcaccagcggcaacgcgccgcgcagtatcagcttcagcgggccgtgggcgcagttccgcctgttcggggccggacaactgaccggagtacaggatggcaactttaccgtgcgctttagcgtggacggtggcgcgatgacctaccgtgtgcataccgacacggaagataacccgttcagcggtgggttgttcagccagtttggtctgtcagacacactgtactgaggaggcagggatgaatagtaacgtactgacacaaactatcgttaccggcagtgacccgcgcgggctgccggaattcagcgccatccgcgaggaaataaacaaagccagccacccgtcacagcctgagctgaactggaaactggtggagtcgctggcgctggcgatttttaaagccaacggtgtggatttacacaccgccacctactatacgcttgcccggacacggacacagggactggcgggattctgcgaaggtgcggaactgctggcggcaatggtaagccacgactgggataagttctggccgcagggcggcccggcgcgtactgaaatgctggactggtttaactcccgaaccggcaatattctgcgtcagcaaatctcctttgcggaatccgacctaccactgatctaccgcacagagcgggcattgcagcttatctgcgataagctccagcaggtggaactgaagcgcgttccgcgcgtggagaatctgctctattttatgcagaacacgcgtaaacggcttgaaccccagctgaagagtaacactgagaacgccgcacagaccacggtcagaacgctgatttatgccccggaaacacaggcatcttccacaccagaagcggtagtgcctcccctgcccggcctgcctgagatgaaagtggaagtgcgcagtctgacagagaatcccccacaggccagtgtgataaagcaaggcagtacggtaagagggtttatcgcagggatcgcctgttcagtggctgtcgcctcagcattgtggtggtggcaggtctatccggtgcagcagcaactgttacaggttaacgacaccgctcagggcgcagcaacggtgtggatggcctcacctgaactcgaaaactatgagcgcaggctgcaacaacttcttgatacctccccggtacagccgctggaaaccgggatgcagatgatgcgtgttgccgacagtcgctggccggaaagcctgcaacagcaacaggcctcgacacaatggaatgaggcactcaaaacccgcgcacagagtagcccgcagttgcgtggctggttgcagacccgccaggacttacatgcttttgcagatctagtgatgcagcgcgagaaagagggactaaccctttcctatatcaaaaatgtcatctggcaggcggagcggggactggggcaggaaacacccgttgagtctctgttgacgcagtaccatgatgcccgtgcgcagaagcagaatacagatgcgctggaaaaacaaattaatgagcgactcgaaggcgtgttaagccgctggctgctgctgaagaataacgtcatgccagaggcggcaaccggtaccacggccgaaaaataattatttaattaaaggagattatcatggcaaatataagttatttatctttgagtggagagacacaagggctaatttcagcaggttgctcaacgcttgattctgtcggaaacaaagcgcagccagaacataaagatcagatcatggtttatgcgttaatgcattccatctcaagaagtcaaaatgtcaatcatcatgaattaattatcaccaaaccggttgataaatcctcaccattgctggcaaaagcacttagtgacaatgaaaaaatggcaatatgtgaatttatactctaccgaaccagtaaagcgggtatttaccagccttattataaaataaatctgtcaaaagcccgaatatcaagtattgattttgtcacaccgcatgctgtccaggaaaaagaactagaaccacaggagagaattgcctttatttatgaagatatttcctgggagcatacgttagccggtacgaatgcaatgagtaaatggcaggatcgtgtacagtaacttactgtaataacataataaattactattgcggagagataaaatggctggtttaaggaataacaacaacacacagaatgcacagtgggctgattatgtgggtgacattcttcggggggctcagccgataaaccagctagtacctcagcacccttatcttaacgacgtcccactcattgatgagttaaggcatcagaacactcatcatgttattctcttgacacttgatgttgcaaaaaaaatactcagcccaataacatcatttgattacattcattttatcactacacatccttcaggtataaaagatacactcgcctggttagttaacgcgagtaaattaatgactgagtttgatgacaatgggaaaattatatttaaccttaatgccttaaagtatacaaaagcaagttactttgaaatacttggagagaaatatataaaaatcacaacatccagcccctggcttttagaaaagctcggtaaatatattttctcttcacgagcgcctcaagttctggaactcgctattggctggcgaggagctttatctgaatcaataaaaggagttaagttctgtatctggttttcagtagcctggagaaccatagaatttattatgagttcagaacgagatctggttaattttcttggcgatttttcaatggatgtggccaaagcagttatagccggtggtgttgcaaccgctattggaagcctggcttcttttgcctgtgttagctttggctttccagtaattcttgtcggaggagcaattttactgacagggatagtgtgtacagttgttttaaatgaaatcgatgctcaatgccatttatcagaaaaattaaaatatgcaattagagatggactaaaacggcaacaggaacttgataaatggaaaagggaaaacatgactccatttatgtatgttcttaacactccacccgtgatatgaggattaaccatgcgtttacatgttaaattaaaagagtttctttcgatgttttttatggccatattatttttccctgcattcaatgcttctttgttttttaccggagttaaacctctatattcaataataaaatgctccacggaaatattttatgattggagaatgttgattctgtgctttggtttcatgtcgttttcctttttaaatgttcatgtaattttacttacgataataaaatcattcttaatcaaaaaaacgaaggtagtcaatttcgccacagacataacaatacagctaactcttatatttttactaatagctatcgtaatagcacctttaatagctccttttgtcacaggatatgtcaatgctaattatcacccctgcggtaataatacgggaattttcccaggagcaatctatattaaaaatggcatgaaatgtaataatgaatatatttctcgcaaggaagattcagtagttaaataattaaatattctaaaacaaacagtttttaactccggattccatgtcctttcttgcactgtctttgtcaagaaaaatttcttatgcaaagaattttgtattatttccgccagaaattcctggcggcagatataatttattattgatagcggttaaccaaatcttttaccatcgctttataggtcttttgcttaagttgcatgatttgctgctctgtcatatcagtcgtactggcttcattcttgtcgggcaatggtggaagcactttatattcataattcaccggcgaccaggcagcccactcacctgtagctacatccaccagcgtgaatcgtaccagatagcgcagtgacatcgtgtcagtcaatttttgatttttataatctgaccaaactattgatttcaatccagagtcatattttcctgtctgcaacgtatcctggaaaacaataatcgctttctgatgcccttttgcagccacaaaacgcagtgcctgcatccagttcatattctcagcactggcaacatcctcgttctcatttttatctttgtttttgttacaagtcagaggcttttgcctgtccgggataccagagaatgtggaaacagtataatattttcgcatctcctcctgcataatggtttccggtgcgcggttgccggattgaacaagtattacaggagaattaaggggaacgcggaactcatctccatcaagcgcagcttgaatatcctcttcggatacggccagagtggtttcattaccgaataaatctttgtctgtcagttgctggggagtgtttttattaatattactttgtgtgacttgagcttttttcttcttttcatcaatagaagattcagaggcacatcctgcaagcagcgagaataatacacatatacaacaaacccttcttaaattcataatcggacactccctcgcctgtcataatcatggtaatgtttagctaacgatttttaattatatactccacttgaataagaacaaacaaaaataacagtatatataaattcattaaatcaatagaaaaatgaaaatcataacattcgaatatatttaaattgaatgattcgatagtatgattaaatattaatgatatggtctaccatatgtgattaacacatttacagcataacaaaaccatagaccgaagaaatagcgggatttaaatgcaaaaaaaccgcaaaattaaaaatcttgcggttctctgaactcattttcatgagtgaatttggcggaacggacgggactcgaacccgcgaccccctgcgtgacaggcaggtattctaaccgactgaactaccgctccgcgttgtgttccgttgggaacgaggcgaatattacggattgcctcgaccttcgtcaacggtttttctcatcttttgaatcgtttgctgcaaaaatcgcccaagtcgctatttttagcgccttttacaggtatttatgcccgccagaggcagcttccgcccttcttctgcaccagatcaagacgggcttcatgtgctgcaagctcgtcatctgtcgcaaaaacaacgcgtaacttacttgcctgacgtacaatgcgctgaattgttgcttcaccttgttgctgttgtgtctctccttccatcgcaaaagccatcgacgtttgaccaccggtcatcgccagataaacttccgcaaggatctgggcatcgagtaatgccccgtgtagcgttcgtttactgttatctatttcgtagcgggcacataacgcatcgaggctgttgcgcttaccaggaaacattttcctcgccaccgcaaggctatcggtgaccttacagaaggtattggtcttcggaatatcgcgcttaagcaacgaaaactcgtagtccataaagccgatatcgaacgctgcgttatggatcactaactccgcgccgcggatatagtccatgaactcatcggctacttcggcaaacgtgggcttatcgagcaaaaattcatcggcaataccatgtacgccaaaggcttccggatccaccagccgatcgggtttgagataaacatggaagttattgcccgtcaggcgacggttcaccacttcaacggcaccaatctcaatgatcttgtggccttcatagtgcgcaccaatctggttcataccggtggtttcggtatcgagaacgatctggcgtgtaattgcagtgctcatagcggtcatttatgtcagacttatcgttttacagttcgattcaattacaggaagtctaccagagatgcttaaacaggtagaaattttcaccgatggttcgtgtctgggcaatccaggacctgggggttacggcgctattttacgctatcgcggacgcgagaaaacctttagcgcaggctacacccgcaccaccaacaaccgtatggagttgatggccgctattgtcgcgctggaggcgttaaaagaacattgcgaagtcattttgagtaccgacagccagtatgtccgccagggtatcacccagtggatccataactggaaaaaacgtggctggaaaaccgcagacaaaaaaccagtaaaaaatgtcgatctctggcaacgtcttgatgctgccctagggcaacatcaaatcaaatgggaatgggttaaaggccatgccggacacccggaaaacgaacgctgtgatgaactggctcgtgccgcggcgatgaatcccacactggaagatacgggctaccaagtcgaagtttaagcttgtggtttacgacattgccgggtggctccaaccgcctggcgaattcgtggcttgtttttactctgtttcatcgggtttagcgttaaaggaatagtccgtttccgggcaacaataagttgtaagcaaccaagcgcaggaatatgcgcattcaatagttttcctccgtgtttgttccacgggagaacgtggaaacggctggcgtgcagcacttcaaaattcaacaaagagagccagtccagttgccgcatcagagtaaacatccggctgttatagggcgaggtttttcgcaataccggcacaagtttgcgtaatcccattaaactaatgggattgaagccactaatcaccagccagccatcatcaatcaatacccgatcggtttcacgcaataaacgatgcggatcggtgcaccacggcaatgtatgtgccagtagacaaacatcaacggatttatcggcaaaaggaagatgaagtggatccgcctgcacctggacgggcattccttgcgcagaaacattcacttgatgagaaaccgcgcacgcttcgcaattgatttctgcgcttaaattgccaatcttaagcagatgaaaaccatacattttagtgaaccacgggttgagctggcgctccagcgccttgcgataaagctctccccagggcaaatcgccccagcgatcaggagccacgacagtttgagggactcttgccggtttcatcacaaccttccgtttcacactaagaggtaatctatgaatcttaacagtattcccgcctttgatgacaattacatctgggttttgaatgatgaagcaggtcgctgcctgattgtcgatcccggagacgcagagccagtattaaacgccattgccgccaataactggcaaccggaggccatatttctcacccaccatcaccacgatcacgttggcggcgtaaaagaactggtggaaaagtttccacaaattgtggtgtatggtccacaagagacacaagataagggaacaacacaggtagtcaaagatggcgaaactgccttcgttttggggcatgaatttagtgtaattgctacgccgggtcacactttaggacatatctgttacttcagtaaaccttatctattttgcggcgacacactattttctggtgggtgtggtcggttgtttgaagggacagcatcacaaatgtatcaatcacttaaaaagttaagtgtgttacctgacgatacattggtatgttgtgctcatgaatataccttatcaaatatgaagtttgctttgagtattcttccgcacgatttgtccataaatgattattatcgtaaagttaaggagttacgggcaaaaaatcaaataacactacccgtaattctgaaaaatgagcggcaaattaatgtttttttaagaacggaagatattgatttaattaatgtaattaatgaagaaacattattgcaacaacctgaagagcgttttgcatggttaaggtcaaagaaagataggttctgataaaactttcttgtcatcggctccgttcgccgttatgatcggtcgtcttttaagcaactattgacacacacatgaaggcaaaagcgatattactcgcctctgtcctgctcgtgggttgccagagtaccggcaacgttcaacagcacgcacagagcctttctgcagctggtcaaggggaagcagcaaagtttacaagtcaggcacgatggatggacgatgggacgtctatcgcgccagatggtgacttgtgggctttcattggcgacgagctaaagatgggaattccggaaaatgaccggattcgcgaacagaaacagaaatatttacgcaataagagctatctccacgatgtaactttacgggcagagccgtatatgtactggatagcagggcaagttaaaaaacgtaacatgcctatggaactggtactactacccatagtggagagcgcttttgatcctcacgcaacgtctggcgccaatgccgcaggcatctggcagatcattccgagcacggggcgcaattatggtttgaaacagacccgcaattatgacgcgcgtcgcgatgttgttgcttcaacaactgccgcgctgaatatgatgcagcgtctgaacaaaatgtttgacggcgactggcttctgaccgtagcggcttataacagcggcgaaggtcgggtcatgaaggcaattaaaacgaacaaagcgcgtgggaaatccacggacttctggtcgttaccgttgccgcaggaaacgaagcagtacgtgcctaaaatgctggcattgagtgatattctcaaaaacagcaagcgttatggcgtacgtctgccaacgaccgatgaaagccgtgctctggcgcgtgtgcacctgagtagcccggttgaaatggcgaaggttgcagatatggcggggatttccgtcagcaagctgaagacattcaacgctggcgtgaaaggctccacgctgggcgcaagtgggccgcagtacgtgatggtgccaaagaagcatgcagatcaactgcgtgaatctctcgcttcaggcgaaattgctgctgtacagtcgacgctggttgccgacaatacgccgcttaacagccgtgtttacaccgtacgctctggcgacacgctttcaagcatcgcttcacgtctcggcgtaagcaccaaagatttgcagcagtggaacaaactgcgcggatctaagctgaagccaggccaaagtttgacgattggtgcaggcagtagcgcacagcggttggcaaacaacagcgatagcattacgtatcgtgtgcgcaaaggcgattcgctttcaagcattgctaaacgccacggcgtgaacatcaaagatgtgatgcgctggaacagcgacactgcgaatctgcaaccaggcgacaagctgacgttgtttgtgaaaaacaacaacatgccagattcctgacaaaccagataataaaaaggcaccgattcccccggtgccttttttatttatgccgctttatgtgcttctaccatgatgatatcactggtgaaagagccatcagtctgcaaggaaaaatacgttctcacctctgtcgatgcgctctgttggtaaatgcgaatagcgtctactaacgcttctggcgtacgcattctcacgacccatgaagaaaattccagcggtaacttatctgtaattaaattatcaactatcagattggcttcattgattaacgtcaaccactcaccgctggcgtagtttcgtacgtgagaggtatcgcgtaatgcttctaccgtctgtaaccagatgtcgcgcactgggtggcccggagacattacgtccatcacaatcagcctaccgccaggtttcaatatccggttcacttcacgcagtgctgcaccaacatcatgccagtgatgggcagaataacggctgataacaatatcaaatgcgttatcggcaaatggcagactttcggcataaccctggcgggtggtgatatttttcagttgccggacttcggcagcttgtgccacgacatccagcatgtgggcagataagtcatacgccaccaccgtgctcacgttttgcgcagcgacaaacgttggtctgccctgtggcagacctgacataccttatttatcaggcttgccgggactgaattcaacgagtagcggattgtgatcggaagcgcgcgtaaccagtacagaagcttcactgacgttcagaccacggtagaaaacaaaatcgagcgggcgaccaaacgcccgacggcgctgatcatcggtaaaacgcacctggcgcagcgacatttcccgcgcaaagcgatataacgcgttcatccttctacggctccaggcattgaaatctcccgccataatgaccgggccgctgtggtgagctatctgatcaccaataggaagtaactgcttactatagacatccacgcccagactgaagttgacggcgtgtatattaaccaccatcaacaggcgggtgtcaggtaatggatagaccgtcaccagtgccgacttcgccagacgcaaaatgggttctcgttcacgtaacgggcagcaatacactggatgtgccgccgaaagggtcattacgccagaaggatgttgtggcagcacgaaagcgggtacctgatcggcggcaagatagttagcggtcgcaaactgtactaactctggcgttgtctgcgcttcctgcaataacaccagatgtgcatctttgccgtagttctttaataccgacaaccattcagcgcgttgctgtttgtatatgttccacaccaggatccgaatacgctcttcggtacttaacggttccccaggtggtaatgcctggccgatgctcgcaaaagaccccggcggtaagatcctttccgcaggttgtccggcaacatagcgcatggcataggtgttttttcgcacttttgactttgaaacctctattacgtcaacccttccgcactcgggagggttctactgttatagggattttagctcactctttcaacgagcaattgtatattgttatgtaagcaagtgcttacaccggtcagaattttgctcattatggagaacattaaatcgcatgacatatcacgcatcctgatggtttaatgacaaataaattcaaaatatctcttctattttgcaacaggagcaaaaatgaaagccacgtcggaagaactcgccatttttgtttcggtcgtcgaaagcggcagctttagccgggcagcggaacaattagggcaagcaaactcagcggtaagccgggcggtgaaaaagctggagatgaaacttggcgttagcctgcttaatcggaccacgcgacaacttagcctgacggaagaaggcgagcgttattttcgtcgcgtacagtcaattttgcaggagatggcagcggcagaatcagaaattatggagacgcgtaatacaccgcgtggactgttacggatcgatgccgcaactccagtggtgctgcactttctgatgccgttaattaagcctttccgtgaacgctatccggaagtcactttgtcgctagtctcctccgaaacgattattaatttgatcgaaagaaaagtggatgtcgcgatacgcgctggtacgttaacggattccagcttacgtgccaggccgttatttaacagttatcgaaaaattatcgcctcccccgattatatttcccgctacgggaagccagaaacgatcgacgatttaaagcaacatgtttgcctgggattcactgaacccgcttccctcaatacctggccgatagcctgtagtgatggacaattacatgaggtgaagtacggtttgtcatccaatagtggggaaacactgaaacagctttgcctgagtggcaacgggattgcgtgtttgtccgactacatgatcgacaaagaaatcgctcgcggagaattggtggagttaatggcagataaagtgttgccagtggaaatgccattcagtgccgtctattacagcgaccgtgcggtaagtacgcgcatccgggcttttatcgatttccttagcgagcatgtaaaaacagctcccggaggagctgtcagagaggcttaatcccattcaggagccagaccttccgggctaaccaggcggtcgttgcaatccagtgcggcgatcgcttttttatcttcggcatcaagctgtaaattttgtgccttaagattactttccaggtttttacgtttagtagaagaaggaattactgagtaaccttcccccatagcccacgccagaatcacttgtgccggagtcgcattgtgtttagctgcgatacgagcaataacctcatctttcagggccttaccatacgccagcgtcatataggaagtaatatggatgccgtgctgtttagcccaggcaaccactttacggttttgcagataaggagagagttcaatctggttagtgtcacgaacggtgcaatagtgatccacacccaacgcctgaaatcagatccaggggcaagcaccttaaaatcaccatcatacactaaatcagtaagttggcagcattacccatttatctcattcataagactcagaagcagtattgtagtgactcagattcggaatatcctgaagaaatctcattttttttcgaattgaacccaataatcacagtaatgtatcgttgcagattaatagggacggtgcatggaatgcactgtatgttagggattacgctgagataaataacaacccatccatcagttaattttattaatggttttttaccattgtaaatgacatgtggtgaaaggttgttgtagtgtttaatatgtcgacatgttcattaaaattcaatagtgaagaatgttctgcattcatcaaggtgcttgatttcactgtaatcaatgcaacattgattacaagcgcctggttctttgaaacgaagtattttggtacggcagtattattttgtctgctcttctctactctctttttgttattttcagaatacacaaaggtataccaacggaaaatcaggaaatttcgttttcgtgattttaaagggattctcggcagtgcattactggctatacttctttgtgaagtaatcaggtatactcttgcacaagtatatcctcagggggattttaactcgctgggtgatgattttgtttcccctattgtcgtatggtatctattaccgtttcctgctcttttgtgtattcgctatttacttcttaagtatacgtccagaaaaagcacccgggtggcaattgttggtgttaccgaaaacggcctggcagttgaagaggcattgcgaaacgaatactcaaacatgcagctggaccttgctttttatgatgagcgggatttttcgcggctcgatgatgtagcaaagaagattaaaagcccatttaagggttcggtacagacactggtcgaagaggccagacgagggaatgttgatgaaatttatatcgctctgccgatggttgctttgcagcgtatccgtcattttctgtcgatgatgtcagatactacggtggatacctatattgttcctgacttttatacttacagtaacaatatgtccaaatttcgcaatatccatgatctgcataccattgctattttcagttcgccgttcgaaggagtgagttcatttatcaagcgtgcggaagatctgattgtgggcagcattatcatggttatgatttccttattaatgctgattattgcgattggcatcaaactgacttctcgtggacctgtattttttaaacaggatcggtacgggctaagcggacaaaagattaaagtgtggaaattccgcaccatgaaggtcatggaaaacgatgatgtcgtgaaacaagccacgaagaacgatcctcgggtgacacccttcggggcctttttacgccgcacttctctcgatgagctgccgcaatttatcaacgtcattcagggaagtatgtcaattgttggcccccgaccccatgcggttgcacataacgagctgtaccgtaagcaggttgagaactacatgatacgtcataaggtaaaaccggggatcactggtcttgcgcaggtcaacggcttccgtggggaaattgatacgctctataaaatggaaaaaagagttcagtacgacattgaatacatcaagaaatggtctttatggctggatataaaaattattattaaaacaatttttaaagggtttgtcggaaagaatgcgtattaaacttttggccattaccggaattgtcattctacaaccggtatgggccgaacccatcccgaaatcacatacaggcattgcgggggtagattttcaaagcgacgttgcagcgaattatggttattcagataacatcacctttcaaccacacagcagcaaggagaaagattctgtatttcagagcattacgccgacgttaagtatggtaggcgagcgttttcaggataaatatttgctgatgtattccggtgactaccgtcgttacgataaggactctgccgacaactacaacgatcattttttccgttttaacggcgcatggcgatacgggctgaaacacggactgaccctgaatctggaagattctctggggcatgaggagcgcgggcgcggaattacagaaggttttgtccaggaacaatttagacagttcggtattacgtctcctttgagcccccattttgtgaatagcgaattgcgttacagttatggtgcacctgaaggacgcggcaaggctgagttggcattacagtataaaaagttacgtttcggtaagacgggcggggtccgtaatgctgatgtagacttttacaattatctccttgagcaggagtggtacgaaaatagtcttattgctgaagtttacgaccaatataccgcgaacacacgttttcgttatagttttattactaaccagcgtcgatacgatcgtttatctgaaaaagatagcaacgagtactatttgcgctatggagtaaagtcccaattatcggacaaaacaaacatcgacatgaatgtcgcgtggttgtataagacgtttgagaataatgccaacgctcgaaattttaatggattgaattgggacatacagggagagtggaagccgctaaaacagtctgttgttacgctacatacttcacagaatattaaagatccgtccgaggtgggtggatatattttattcaccaaatatggtgtttcgtaccaacacttttggttgggggatcgtttttctactaccctggattattctcttagccgggaggattacaaaaaacaggacaaaaatcgtcgtgacaggaatggcgtgtttacgatgaaaatgagttacgactataccccttcggttaacgttgaactcaagtatcttctgaataagttggattcgaataagaatacggattcgttctacattggacctaacgacgagcgggaagtaacaaggacgttaggttatgacaattcaatgattatgcttactgctaaggttcagatataaaatgaaagtaatcaatttgtgcacatttttactgtgcagtattttgttggtgggttgctcatccacccgaccgcctttaacagacgacgcgtcgactgtcacggagagttatattctgggtgccggcgatacggtcaatatcatggtttacggtgaacccgagatgaccatgaaatttatcatcgataaaagcggcgctattactttcccttatatcggtaaactgatgctgaaagggaaaacggcagagcaggtggggaaagaaattaccaagaagctacgtgggcattatttgcaaaacccaatggttaccgtcagcatcgcagaatttcgtaaattctatgtctctggagaagttagaaatcccaatggttatgcctatgaacccggcatgactgttgagaagtctattgccctggcgggtgggtttaccgatcgcgcggatcgcaaagatatcaatatccgactctcagggaataatgaactgcttgagaatgtggcattgacccattctgtccgtcctggggacgtagtgatcattggaatgggatttttctaacgatgaaattatcaatagtggaaaatggaaaaaaacgggaagagaccgtcgacgtttccagatttgccaaagaaattaaaaagaacgcctgtaagattgtacttgcgggaattatcagcggtgcagttgcctacccattaatcagcatgctgtcatcaaaatatgtctcaacagctacggtgttgctaaaggctcaggctgataacgtttcgccgttcccacaggtggaagattttgattccacgcgcaccggctactatgagacgcaatatgccttgatgcagtcgcgtattgttctggagaaagcggttcgcgagttaaagctggatcaaaacccagactttattggcaaaaaagcggatgaaaaggccagcaacagcgaagatgctgaacagcagcgcattgagcgcgcgctgaacacgctgcaaaaaaatcttaccgttagcggtattcgaaccactaatctggcgacagtctcttatgagtcgacatcgccacaactctcctctgagattgccaacggcgtcgcacaggcgtttatcgattatacgttggaccaaaagcggctgaagacagaaaaagccagagaagtaaaccttcagaaaatggaggaagtgcagaaagagatcgcgcagcagaaagccgatatcgataacttcctggcgaaagagggcttattaacgttccgcggcattgatggcttcgaaaccgagcaactcagcattgttaccaaccgtctggccgatgctacccaacggcgtattgcggcagaatctctggaaaaagccgtcagcgctgggggccgggtctctctggataacatcatttcattaccgacgatctctaaccatgcgcaaattcaggatttgcgtatcgccatgattcaggcgcagcggtctttgtatgagttacaaaaatcatatggcccgaaacatgcgaagatcctggaagcgcaggctcaggtgaaggctattcaggatcagatgggcgtggtgctcagtgagcttaaaaaaggcattcatcagcaatatctggccgcgctggcggatgaaaaggattatcaggcgcaacttgatcaacagaaagaaatttttcagaaactggctgaaaaacgcagcctgtataacagccagaaattgtcactggataaactggaagatctttataaaaccctgtatcagcggacccaggaactgtctctgtccggcattaatgcggatgcagtgctgtacgatccggctgtcccggcagtgaagccatctaagccaaataaagcgttactgttagtgatggtggtggcgctggccatggccttcttctttatgtacgtcattgtaaaagcggcgatggataattccatcaggacgctcggacaagtgacaaaacgactgggcgtcgtctcactgggtgagatccgccgcattgcgggggccggggaccgtgcacaggttcgcgatttgatcacgcgaaaccccttgaacgccgacattatccacagcattcgtacacagattttgttggataaccgcccgcagcaggttctggcaatctcctctgcaaagcagggtgaggggcgctctttactggccagtctgctggcaaactccttcagctttgatcagaaaaccttactgcttgatttggatttctttaaccgtgatggcctgtccgccgagttttcaacatcgacctctgcgggagttgcagagctgttgcgtggagaagtgacacttgacgctgcgcggatcacgcttagtgacacgctggactttttaccccgcggaaaagcgaacgcttcgtctttgctgatgctgtcttcggaacgttttgaacctctcattcgtgacctgcgaaatcgctaccagcggatcatcgtcgatgtctctgcggtgagccagagtcaggacatcgagctgattagtcgggtggttgatggtgtggttttcgttgtgcaagcgggggctgcgtccgtggagacgctgcgcgcggcgctggcgaaagttgacgccaaccaggaagtggtcatgggagcggtactcaatctggttgaggaaaaaaatctgcagacgaaagagagtcttcgctcgctcaatatcactactgacgaattgatgaataccacaggtcggttatgagtttattgaagagtgcttccactattgccgggtcgtcagtcatttcgcaactgattggcgccttctcaatctggttaatctcgtataaatacgatctcgcggaagtgggcctgtatgcgctcaattacagtatcgctgtgatcggagcgcaggtatgtacctttgcgtcccaattgcttattcctaaacaatcggaagaagagttaacgcaaaatgtggtgttttgccttctgcaaagcgcgattctggcgctgccttacgcgctactgacggcgtggctattccatcaaaacgtgctgtttctctatctgttatcgctgtcgaacgcatgggttctgatatcggaaaacctgtcactgcgcacgggtaatttccggtttctcatcttccagcgtatttcggtgtcagtcgtcgtggtgctgtctgttgtactgacgaatcaggttcagatgttttactggacctgggccagcggcatgatgctgctaaccatcagttgtatcgcgcgatcttttaatttccgtacggtcacggcgcagcatctgtccctgaaaagcaacctggtgtttttcaggacgcattttcaccatatttcgcgagtcgggagtgccgaagtattggcgatggctaacaataatctgccgatcatgctcataaacttttggttttcggcattaacggcgggctatttttccgtggtcagtcgcttctgtctgtcaccggtgaccattgtcgggaatgcggtgcgtaataccattttctcaaagtggtcgatcgacttcagaaataacacgtttaactatccggaataccagcgggttcgtttcctgctgatggtgctcggggtgatatgtaccctgggggtgtttattttttatcctattgtgatgcatcttggtttcggtgaggactggatcaattccattgatacctcgcgttatatgctgccctatctattcccggcgctggcggtcagtcctctcaccgtcatcgaactgatttttggatcacaccgatatttcctgcgtattcagctggaacaactggcaatcgtactgatcgcttttgtagtgacgccttatttctataacgactatgccacctcggtgattattttctccgttctgacgtttattcgttatgcattcatttatctggcgatgaataaacgtgcgacgcttttgaagaacaacccggtgatgccatgaccttaaataccggattttatctccagatttacacgttcataaccctgatattgtgcgggctagtgcaatattttaccggcatgcaggccgttctctggctgccattttgtctcgcccttgtgatggtgggcctgctggtcatgcaaacgcgtgacggcactcaggggttggatgatcaggaaaccatcattctcgcggtctattgttctttcctggcgttggtcggcctttcgaccttgatccagggcgggccagtggtggcgataatcgcgtttaaaaacgagataggcctgtcgctggtcatgatctgcctgctgttgggtttttgccgcgagtcgcaaatctaccgcgtcactcggtgtttatattgggtgttttacgcccagataccggtgatgttctatcaggtattttttgtcgtgcctcagcgtgtggccctgctcggtgaagatgaaaagtgggactcggtcgtaggcacctttggcggtgatccgatgggcggcggaaataccgcagcgatgggcttattttgcctgttaattatgctgctaaagctttctgaatataagcatgggttaacgacaattaagtctttggttctgcatattattcttggtttagggttgtgtattattggcgaagtgaaattcgtcatcctactttcacctctgtttctggcatgggtgtgggtcacgcccggctatgttaaagatatcagtaaggtaaacctgaaagcgctactggtgattatcctgggtatggtgctgctgattacattggcgattgttattctcgcatcgttctattcggctgcctttggtaccgatccgactcagagctcgttaagcgtcttctgggaatcgttgagctatatttttgacccgaattacatattgtcgaccggggagctagggcgctttactaccctctttttctggtgggagaataatgatctgctaggtatttccggtacgttatttggttacggactgaatgctaccaacagcggcagttctgtttctccgggctttttgaatcttatttataatttaattctggactccacctctctgagtatgttgctgtgggaagttggcgtcatcgggacggtattatttattggtttattcatctttattctaaaagtcactcaggccaaacccgtgttacgccttgagcaattagatcagcaggatttgcaattggtgagtttcgcacctgcctacaacgcttttgttattagctgcttactgagtatcccctatagccagatactcatgattacaccgatgttgcagtttctcttttatttatctctgggatgcagtctggtaattcgtcgaaccgttcttcgtagtgttgagtcattgtatgaacaataaaccgtttatttcagtgagcataaaaacgctcaatgaatctgagtgtattgagaaaactatcgatagcatccgtcagcagcttagaggttatccacataaaattatcgttgccgatagcctgtccacggataacacccaacaactggcgggtgacaaaggggtaatggtggtttcgctcaccgagccgggcgatcgctgttgcggcgttggacatcagctcggttatctctacagcgaaggggattacattctgctgatggacggtgatatggagcttgaacccggctttattgatcgcgcggtgacctttctggaagcaaattcagagtatgctggcgtggctgggacggtggagatggatgaggccgcaaactatgagtttatctcccgtaaacagcgccttgatacgatctatccagttggggattgcgaccatttaggtggcggcgggttataccgtcgttctgcaatcagaaaaattggttatctgaccaaccgcaatctacacgcgtatgaagaggctgaactggggcttcgtttattggaacatggctataaattgcatcgcctgaatattccttatttccgccatacgtcgtacacgttgccaacattcaaaatgttgcgctaccgctggcggagtggttattaccagggtatgggcgaaatattacgtagcgcctggggaaaaccgtatttttcaaccgtagtgaaaatggtaaaaagcgaagtggtttttttactgtatttgatgctgttggtatgttcagtatttacgctgaatatggatattgtcggcgttgcgctgctgccgctacttgtatttatcgtacttaaaactattaagaatcgttcgctggttaatggactatacagcgctatgaatatgaccattcgcgctgctggattattgaaagggctgatgcaaccgatgcgcgatccgattgtaccgcctggcaataaaatcattcatcgttaatggagttgacgaaatgaaaatattactagttaacaagtttttctttattaaaggaggtgcggaaaccgtttattttcaggagagaaactggctgaaagcagcgggtgtcgacgtggtggatttctccatgctgcatgagaaaaactttccgtccgagtatgccgatacttttgtccgtaatgttgattaccacaaagaaagcacccttctgggcgaggtgaaaacggcgagtaattttattcacaatgcagaggcttgccgaaaaatgcggacattattgcagcgtgaacgcccagacattgtgcactttcataatatctatcatcaattaaccccggccctcattaaggtggcccgcaattttggttgtaaaacggttctcaccgctcacgactataaaatcgcctgtccggcctactccatgctgagggacggtaaggtgtgcgatgcatgcctgaccgggacggtattcaacgcttttcgttaccgctgccaggaaggttctgcgacgaagagtttactgctttctttggaagcgacctggcagtcgattgccagaaattatcacatgctcgatgtgataatttcgccgagtgaattcctgaaagggatattaaggcgcaaattgccgcattcgcggattgatgtgatcgtcaacggtgtcgatgacgaccctgcgacagacaagaccgccgataaaggctacctgctgtatgttggccggctcagccgtgaaaaaggggtcgccacattgcctctggcacatcagaaaatgcgcaaccgtgcgccgttaaaggtggtgggccatggtccactctacgacgagctggtggccaactacccggatgtcgaatttttaggctacgtacagcagggggaggcgcttaatacgctgattaaagaggcgcgcgcggtgatccttccttccgaatgctatgagaactgctccatgtcggtgctggaggcaatgtccttcgctaaaccggtcattggttcgcggattgggggtattccggaacaaattcgagacggtatcgacggagttctgtttgaacccgggaatgtgcaggatctcgccaatgcaatggattacatgattgattccccggaaaaggcccgcgtcatggggctatccgctcgcgaacgtctgcgcgaaaaatatacgcttcaaaagcatatggaaacgctaactgcgttgtataaggaaattctgagctggtcctgatatgtcacaaaaaatcacggttctcggtacacgcgggataccggatgtccagggtggtgtggaaacacactgccagaatctttacccggctataaaaaagcagtttgatatggatatctgcgttatcgctcgctctccctacgtcagctataaacagacgtattataaaaatgttgaaacatactctctatgggctccgaagaagcgatcgctggaagcgattgtccattccttcttagccacgttaagaacctgtttcgatggttctgatattgtgcacgttcatgccatcggacccggacttctggtgccactgctgcgtgtgctaggaaagaaggtggtgtttacccaccatggtccagattacgatcgccagaaatgggggcgtctggctaaaagggtgctgcaactgggagagaaagtggctgttaagtatgccaatgaagtgatcgttatttcagaggtgattaatcaactgatacgcacaaaacactgtcgtgatgatgcacacttgatctacaacggcgtcaatttaccgttgccgttaaaggaagagactgtgcgcacggtgttgggacgttacgcgctgcagccgcaaaattacctggttgtcgttgggcggtttgtggaagaaaaaggtatgcatgatgcgattgctgcccaccgcaaactggggctcacgatgccgctggtattggtgggtgatgccgatcatcccacggaatatagcgtccgccttaaaaagatggctgcagatacgccgaacgtcatcatgacggggttcctcaaaggtgaggaattgcaggctatcttttctcaggcgcggctgtttttgatgccttcataccatgaagggttaccgatagcgcttctcgaagcgatggcctattcactgcccgccgtggtcagtgatattcctgcgaatcttgaagtaaaattgccgccagaatcgtatttcgaggtcggcaacgtcgacgctctggcgcaaaaaatagcagcgttggtttcctcacagcggattgactacagcgcctggctgaaaaattacgactggcaggtgatcgcgagaaaaaccgccagtgtctaccattccttagcaaataaaaaaggttaattttgacccgttctgaacaacgtcctcttgtcattgaccggttctatgaagcgcttgacgagcaaactgctgagcaattaactgcgcagcagaaagccgaggttgaaaaggcgatcattgcgatcacgctggcctcaaggcatagggtggattttcgccgaagctttccgtttttcggcaagcgtttttatctggtatttctgatgggcagggatatgcgtaagcgattccgccatgagtcgacgttgtccagtctgctggcggcttttctgctgttatctgggcttctgtttctaacgttttgtgtcctgctgacgctgtatatgatcaaatccgctttaggcattgatgtgttccatgattatcatgttggtatctgggactggtggttaagcctaaaaaatcagtagcaaagatctgtttgagagagtgatgaaacatcagtggatgacggccatattctgcctggtgtgcccactgtcgtcgatggcggcaataacgacggtaatgccaaccgcgctgacggggcctttaaccaatccgggcatgggcgtggccagttttcatcagggttatggtgaaaaactgccgctgacggaataccccgataccggcattgagtacgaacgtttttactggcgcgatctggagcccgaggaaggcaagtatcattttgcgcgggtggatgacgcttttaagtacgcagcggcacatcggccggccatgaatgttggtctgcgatttatggcactggccgagccgggtagcggctccaggatccccgactggctgataaaaaaaggcatcaaaggtacatggactgcggatcgtaagagcttcattcctgacttagccgacccgctttttattacctatagtcaacgactgctccaggcattaggtcaacgctacgatggcaatgacaatctggcgtttgtggatattggtatggtgggatcatggggagagtggcataacagcaacttccctgaactgaaacctctgttggaaagaaacacgacggaggagctcgatcggttcgtcaatatgcatttttcagcgtttccaaagacgcccaaagtcatgttgataagcggcggtaatagcctggtgaatgctgtgcgtaagggcgccggatggcgtgcggactgctggggcgacttacgcatgttttcgtcaacgtggaatcatatggccgatgattaccctcagcggctcgaggcagcgcagcgagcctatccaggctttaatgatgcatggaaacgcgcaccggtgaatctggaaatatgcgggtatatggcgcagtggcaacgcgatcagcactatacgcgcgaggaagtacagaggatatttgattgggcactggcacaccatgccagcacgcttaatctgaaatcacgtgttatccccggtgagtaccggcagattgtcgataatgcgctgactaaaatcggctaccgttttcgtctggtatcgttaagtcatgagtcagtagggcagccaggcaccgccctgacgctcaacagccgttgggtaaacgaaggcgtcgcgccgatttatcttccttatacgctgtcattccgcctcgtggatgcttccgggaaacctgtagccagcggagaatcgaaggaagatctcctccgctggttgcccggtgagtatacggtggattttctgctggatatgccgcggacaatgccgggaggcagttactttatagaggtggcgattgtcgataaatcgggggcgccaaggatccggctggctaatgaggggcagcaaagcagcaactggtaccggatttcaaaggtgactgttctgtcatcgacgcaatgaaacgatgggcgtttatggcccatcgtgaagaggatctaaactgaggatcagacgctgcgatagccgttcgggttatttttctgccagttccaggtatcacgcatcatttcttcaatagtgcgggtggcctgccagcccaattcccgccgtgctcgggacggatctgaccagcattctgcaatatctcctcctctcctcggtgcaaagcggtaattgatttttgtctgcgccgctttttcgaacgcgttcacaaggtcgagtacggaatagccgataccggtgccaagattaaagactttatacgcgtcacctttatccttattgtccagtgctgccagatggccatgggcgagatccattacatgaatatagtcgcgtacgcccgtaccgtccggagtggggtaatcattaccgtacacggatagtacttccagcctgccaatggtcacctgagcaatataagggaccagattgttcgggatcccattgggatcttcaccaatacgtcctgacggatgcgccccgactgggttgaagtaacgcagacaggtaatacggaattcaggctgagctcgcgaaaaatcttccagaatctgttcaaccatatatttggatgtgccatatggattagtggtaccgcccgtacgggagttttcattgagcggtacgcgatccgggttgccgtacacggtggccgaagaactgaatataaagctgtttacgccggccgcacgcatttcctcgagcagaaccagtgtgccagtgacgttattctggtaataagagagcggatcttttatcgattcagaaacggattttagacctgcaaaatgaatcacatcagtaatattatgcgacgcaaaaatcttcttcagaagatgtctgtccatcacgtcgcctttatagaaaatgggtttcttcccggttaattctgcaactctttccagagaggtttgcgaagcgttagaaagattatcaagaactacaacgtcatcattcctttcctggagagccaacacagtatgcgaacctatatatcctgcaccgccagtgacgagaattgtcataaaatatccgtataaataaaatgctaataactcggtgtttctgcttaatgcgtttttgccacagcaatatccttaattatcgccaggccaattgaagtgttctgtatttaactatgaatttatacgctaccttttttaagaaagataatggactaaagacattttttttggtgtcataaacgatatagttatcggaaaagttaagtgtatgtactccgtcactgttattgagagatggagggatgttatctacgaggctttctttaaatgttgatatatctaaattatttaactccttgataaaaaccgattttccataagtatctggcgtacattcctgcgtcaggatatacattttattatcgatggtatacggaccacccgcgctacgattgtgttcattacagacttcaagtaatggcgttattttttcccattttccagttacttcaggcgcggtatgaatgaccaattcattttccatcgaggtcgacattaaataaaagcgttcattaacagtaagtaacacattgtcggtaagcggagcgtctgagagtaaaaccttgacttgtttccagcgcaccgggaaatcgatcgcctggaataatatcacctcttttctttctgaggattccgggatcatatataaagttccatttgtggtgaacaggaatggaaatgacagatggcattttaaattatcaaacccctccagtttcacatcatccagttctttgaggtttttatccaggatacggcatctcagaataccctttgagttgcgaaaattaaatgcctcataaaaaatatacagcttatcctctttctcaagaagaaacggatcggcctgaaaagtgaatttcttttttaatctttgtgctgttgaacgtctcagtatgtccagagtgttatcgggaaaggaatgagaaccatcgtttttaataaccatgatatcccaagactcatgaaagaataacatatttaatatacgattccatttcatttcatgaagtccacttattgatagaattgaaaatcatcaataacatagaggttgtatacatgctatcgttccatcgataattcacagatacattattcgtagaggcactccaggaatgctttcagttattcattggggttaaaagaatttacatgaataatgccagtgaagactaaccagaataataaactcaagaataagattatcatcaattataacgtcaaatatataagatatttatttcgcttttcggtaggaaaaaccgaagaattgaataacggccagtatgttggtaatgctgccaacttactgatttagtgtatgatggtgattttaaggtgcttgcactgcaaaataagaagaggaaacgcagcagaattattttcagggatacggcacattgctattaatattttgacgaatgagaaggtattcaaggcagggttaagacgtaagatgcgaaaagcagccatggacagaaactacctggcgtcagtccttgcggggagcgggctttcgtagtaataccccgactctccccgtccttaaacacaacccccactcaccacaacctaaactcatccgcatcctgccatgccggaaacttttctctatattcccgcaatgctgccatcgacagctccgcatcaatgcgcgttgcctgatgcgcgtcggcagtagcgataatctctccttgcggattaatcacccggctgtcaccgcgataatggcagccgttgccatcgctgccgacgcgattgcatcccgccacatacgcctgattctcaatcgcgcgggccgtcagcaatgcctgccagtgcagagagcgcggagcaggccagttggcgacgtacagggcgaggtcataatcgttgagattgcgcgaccacacaggaaaacgtaagtcgtagcacaccagcggcaaaatacgccagccgcgccattccacaatcactcgcgcattgcccgctttataatgtagatgctcatctgccatgcggaacagatgacgcttatcataaaaatgtaccgtgccgcccggctcaaccagcaaaaagcggttaaccgaaccagactccgtttgtaatgcaacactgcctgcaatcagcgcattgcactgctgcgccttagctgtcatccagttcactacgtcatcttgtgctagcgacgaagctgccgcttccatggcaaagccgctggtaaacatctccggtagaacgatcacatcgcgcccggtaataccttccagttgacgatcaaaatgacgcaggttggcaggaccatccatccacaccagtggttgctgcaaaagcgtaatcttcaaaccaggcacggtgtacaactcctttatgcgaagggttttataactttaacaccttatcaggcagttgccttagcgcagaataaattgataacaaatgctgatattggaaatatctgatttgcaaattatcgtgttatcgccaggctttaggaggttaataacatgggcaggataagctcgggaggaatgatgtttaaggcaataacgacagtcgccgctctggtcatcgccaccagtgcaatggcgcaggatgatttaaccattagcagccttgcaaagggcgaaaccaccaaagctgcatttaatcagatggtacaagggcataagctgcctgcctgggtgatgaaaggcggtacttatactcccgcacaaaccgtaacgttgggagatgagacgtatcaggtgatgagcgcgtgcaaaccgcatgactgtggctcgcaacgtatcgctgtgatgtggtccgagaaatctaatcagatgacggggctgttctcgactattgatgagaaaacgtcgcaagagaaactcacctggctgaatgtgaacgatgcgctttcgattgatggtaaaacggtgttgttcgcggcgttgaccggcagcctggaaaaccatccggatggctttaattttaaataattagcggataaagaaacggagcctttcggctccgttattcatttacgcggcttcaactttccgcactttctccggcaactttaccggcttcgtcgccagctcttccggatcaaagtcatcaacgttaatactgcgcagacggctttcttcagctttcaccagaatagcggcttcatctttatcaatcagccccttcaccagcgcgttgtgcgccagttcatccagacgggtaaacggcaggtttttacccagctctttacagatccgctgatgaattgggtcggcggcaatcacatccaccagcgcctcttccagcaagccaaccggattatgctcgctcggcgtcaggtactgaccgcgaccaatgcgggaacgggtggcgttcggcacttgtaaaatcttcgccactttatgatccagcttgtcagaaggtgccagataatgacgtccggtcgggaagatcaccacattcagcagcccggcaaccacgcggttcgggaagttttgcagtaaatcatccatcgcctgttcagcctgatacagcgcatcttgtacgccccagtgcaccagcggcaggtcggcttcattacggccttcgtcgtcataacgcttcagcacggcagaggcgaggtagagctggcttaaaatatcccccagacgggccgagatgcgctcgcgacgtttcaggctgccgcccagcactgccatcgagacatcagaaagcagggcgaggttggcgctcaggcggttcaggtgctgatagtagcgtttagtggcatcgccggttggcgtgctgctggttaaaccgcgcgtcaggcccagccagaagctgcgaactttgttgctaccgacgtgaccgatatgtttgaacaacagtttatcgaacgcgttgacgtcattgttcttcgccgcttccatctcttccagcacgtacggatggcaacgaatcgctccttgtccgaagatcatcatgctgcgggtcagaatgttagccccttcaacggtgatggcaatcggtgcgccctggtaagcacgcgccaggaagttgctttgcccgagcataatgcctttaccgccggtaatatccatcgcatcaataatcgactgctgcccgcggtgggtacagtgatacttaacgatagccgacagcacggcaggtttttcgccgagcataatgccgtaggtaatcagcgatgccgcagcatccatcacgtaggcattaccggcaatacgcgccagcggctcttcaatcccttccatcttaccaatagagattttgaactgacggcgaatgtgagcatacgcgccggttgccagcgctaccgatttcacgccgccggttgagttggaaggcagggtgatgccgcggcctaccgagaggcactccaccagcatccgccagccttgcccggccattttcggcccgccgatgatgtaatcgatcggcacgaagacatctttaccgcgcgtcggtccgttctggaacggtacgttcagcgggaagtggcgacgaccaatttccacgcccggcgtggtggttgggatcagcgcacaggtaatgcctaaatcttctgcaccgccgagtaatttttccgggtcggagagtttaaacgccagcccaagcacggtcgcaatcggtgccagcgtaatgtagcgtttgttccaggtcagacgcatccccagcacctgctggccctgccattcgcccatgcagacaatcccggtgtccggaatcgcgcccgcatcggaacccgcttccgggctggtcagtgcaaagcaggggatctcctgaccacgcgccagacgcggcagatagtgatctttctgctcgtcagtgccgtaatgttgcaacagttcgcccgggcctaatgagtttggcacgccgacggtaatcgccaggatcccgctcacgccggagagtttttgcagcacgcgagactgggcataagccgagaactccagcccgccgtactcttttttgatgatcatcgcgaagaaacgatgctctttaaggtacgcccacaactccggcggcagatccgccagctcatgggtgatctggaaatcattcgccatccggcaggcttcttctaccgggccgtcgagaaacgcttgctcttcggcggtcaggcgcggctgcggatagttatgcagctttttccagtccggcttgccctggaacaagtcgccctcccaccaggtggtgcccgcatcaatcgcttctttctcagtgcgcgacatcggcggcatcaccttacggaaaccgcgaaataccggcgcggaaatcatcgacttacgcataggcgcaaagttaaatggcacgaggataatggccagaggcaccagtacccacgccgaccacagaccagcaacgccgagggcggctgtccaggcgagcaaaatcagactgctgataaataagctcacgcggtgatagaacaacgcgccgagcaggacaaccgtagcgagaatactcaaaatcatcataacgaaaagccccttacttgtaggaggtctgaccacttgtgatgatatggttgtagtggatgtaaaaacatttagcaatatgtttacaatataattacaacaaagctcacattgttgctgtttttatccgcacttcaggtcaaaaagtcctggtcatagcacctgcccgtacttctcgcttttggcggtatccggtacactgcattttgtctattacatttatgctgaaggatatcctcatgtaccaggatcttattcgtaacgaactgaacgaagcggcggaaacgctggctaactttttaaaagatgacgccaatattcacgccattcagcgcgcggcggtcctgttagcagacagctttaaagccggtggcaaagtgctttcctgcggcaacggcggttcccattgcgacgctatgcactttgccgaagagttgaccggtcgctaccgtgaaaaccgtccgggctacccggcgattgctatttctgacgttagtcatatttcctgcgtcggtaatgatttcggtttcaatgatattttctcccgctacgttgaagcggtaggtcgcgaaggcgatgtactgctggggatctccacctccggtaactctgcaaacgtgatcaaagcgatcgcagcggcgcgtgagaagggaatgaaagtgatcaccctgaccggtaaagacggcggcaaaatggctggcacggcggatatcgaaattcgcgtaccgcactttggttatgccgaccgcattcaggagattcacattaaagtgatccatatcctgatccagttgattgaaaaagagatggttaagtaagtctggcgtaggccggataagacgtttacgccgcatccggcatttgtgcgctgatgcctgatgcgacgctgacgcgtcttatcatgcctacaaatctgtacgcgaaccgtaggccgaataatgcgttcacgccgcatccgacctgaaaattcttaaatcaatcttcgccgggggccatgcgctcccgctgttgtggaggttacccatgtgcgaattgctcgggatgagcgccaacgtccctaccgatatctgctttagtttcaccgggcttgtacagcgtggtggtggaaccgggccacataaagatggctggggcattaccttttacgaaggtaaaggctgtcgcacatttaaagatccacaacccagctttaattcccccatcgccaaacttgtccaggactacccgataaaatcctgttcggtggtggctcatattcgccaggctaatcggggcgaggtggcgctggaaaatactcacccatttacccgcgagttatgggggcgtaactggacttatgcccataacggacaactgacgggctacaaatcactggaaaccggcaacttccgcccggtaggcgaaaccgacagcgaaaaagccttctgctggctcctgcataaattaacgcagcgttacccgcgcacaccgggcaacatggcggcggtatttaaatatatcgcctcactggcggatgaactgcggcagaagggcgttttcaacatgctgctttcggacgggcgctatgtaatggcgtattgctcgactaatttacactggatcacccgccgcgcgccgtttggcgtggcaacgttgctggatcaggatgtggaaatcgacttcagctcgcagaccacaccgaatgatgtggtcacggtgattgcaacacagccgctgacgggcaatgaaacctggcaaaagattatgccaggcgaatggcgcttattttgcctcggggagcgtgtagtttgatgccagttgtggctgcacaacttcgtggcttaacggcttgctgaccacgtaacgaccattgaccacagaaacggttggtggcttacgggtttgctcaaagtagtcgtaacccggcttcagttgctcccagaagtccttaaagttggaatatttatggcgcttcatattggcgtcggtcatgcggaacgggtaaatactcacttgcacgctcggctgaccaaacaccagcgcaccagtaacgaactggaatatctcatcaataccctgattggtcattgcgtagcagccgatggaaacacaatcgccgtggatcatcaggtatttcccttcataaccatgcgcacggtcataggcattggggaaaccaatattaatcgctttgtagtaacggctgtctggttttaactgattacgctggacgctataaaacccttccgggcttttgaaatcgccctgacgctgttttggccctaagccgccggaatatttacagattttatagctgtcgagcagttgatattgctcgcccattttgacgtagagatcgagcgtacgttcttccttgaagatctggatgtagacaggggatcccatcaactgctgcttatactctttgctcacaggcgtggtagagctactgctgcccagcaaaccggcaaatgaaacgcacgggatcaacaacatcgcaagaattaatgcgattttacgcatactgcttattccttgataaaacggttacacacgccaggacggcaaaatggatcccaaatcggaatagtctggatttggaaggctcacattatcaccaaaagagttttacgcaagcctgtcggcgcagggtttacaaatttcatcggaagcgggctttacccaaagagcgccgcgtgagttccagttctctcaaatcgtaaaagtttatcggtaagtttgtaaatcaggatccagtccggttcgacatgagcatcgcgataacctttccatgaaccttgcagcggatggtctttataaacagctggaagcggtaaagtattattgataagaagcgtcataagatatttcaatttattcatatccttatgacgcttttgtgcaagttttacatcctttgaatattgtcccgagtattcaatatccctttgaatcatatttaaattcctaatttatcaaataaatcatcggcgtctttggccttatgaacatcaatgccagcttcgctgtttttgattgattgaatggttaattgattaggctcgcgtaaatcaaacggcaatgccttttcacgcgcgacctttgtgagggttatgcgaaccaggtcagagatggtcagccccatcccggccagtacgtccgctgcctgattcttcagatcttcatcgattcgggcgcgaacaaacgcgttagcagccattggggtatctcctgtgctgtatatttattcagcttgaattgtagctcaaatgagcaacagcgacaatccatgagtaatttaataaacggatgtttttacataattaactgaaatatatatgttaattttataataatggtttattaagtttgttcagaaacgatccgggatacactgcaacattaaagcatgaccagccattattgagtatgtccttgccgtcgattccatcctttgtattgtcgggattactgttgatttgtttgccgttttcttcatttgccagcgccaccacatcacatatctctttcagctacgccgcccgccagcggatgcaaaaccgtgcgcgtttattaaaacagtaccaaactcatctgaaaaagcaggccagctatattgtggaaggcaatgccgaaagcaaaagggcgctacgccagcacaaccaggagcagataaaacagcatccagaatggtttcctgctccgctcaaggcgagtgacagacgctggcaggcgctggcggaaaacaaccactttttaagcagcgaccatctgcataacattaccgaagtggcgattcaccgcctggagcagcagcttggcaagccttacgtctggggcggtacgcggcctgataaaggctttgactgtagcgggttggttttttatgcctacaacaagatccttgaggctaagctcccgcgcacggccaatgagatgtaccactatcgccgggcaacgattgtggcgaacaacgacctgcgccggggagatttgctgtttttccatatccacagccgcgagatagccgatcatatgggcgtgtatttgggcgatgggcaatttatcgagtcgccacgtaccggcgaaaccattcggataagccgattagccgaacctttctggcaggaccattttttgggcgcgcgcaggattttgacggaagagacgattttgtaggacggataaggcgtttacgccgcatccggcagttgtacgcaggtgcctgatgcgacgctggcgcgtcttatcatgcctacgagcccgcgaatatttgcgagccgctttcccgatataaaacaacctcattgccaacctttccttttcttcttaccgttgagaaaaaggagtcgccatgtctgaatatcgtcgttattacatcaaggggggaacatggtttttcacggtgaatttacgaaatcgtcgaagccaacttttgaccacccagtaccagatgctccgtcacgccattattaaagttaagcgagacaggccttttgaaatcaacgcctgggtcgttttgccagagcatatgcactgtatctggacattacctgaaggcgatgatgatttttcctcgcgctggcgggaaattaaaaagcaatttacccatgcttgtggattgaaaaatatctggcaaccacgtttttgggagcacgccatccgcaataccaaagattataggcatcatgttgattatatttatataaatccagtaaagcatggttgggtaaagcaagtgagtgattggccattctcaacgttccatcgcgatgtcgcgcgagggttatatcccatcgattgggcgggggacgtaacggattttagtgccggggagcgtatcatttcataattgtgcgcagatgcctgatgcgacgctggcgcgtcttatcatgcctacaaacttgtgcctgaacggtaggacggataaggcgttcacgccgcatccggcagttgtgcaccaatgctggatacttacatcaacgcccccataatcttcaactccagctcatccggcacttcgttatacgacagcacatgcagccccggcgcaaacaaccttgcataacgcgccagcaaagggcgcagctgcggtggcaccagcagcaccgggtctttccccgccgctttcatctgctctttcacctgtggcatcgtactctggaactggttgagcatattcggatcgaccggcacgctgtcgagcatcactttcccgccctgttgcgcctgattcaccacgttggtcagcagattttccagctcattattcagcgtatacaccgtcagctcctgcttgcgaacgaacggatgggtaatgctgcgccgcaatgccaggcgcacatcggccgccagcagaatatgatctttcgtcaccgtgctactggcgaccagcacggtggcgatggtgacgatatcgcgcagggaaacgccttcggtcagcagcgcccggtacactttcagcaactggctgtaattgagcgccgcgctcaaatcttccgccagacgcggtgccgtcgacgataaacggttatgcaactgcgtaatatcatcatagttaaacaaatcaggaatatagctgcgcacaatcttatttacatgggtagcgatcacgctggcgctgtcgatcacctgataccccatattcagcgccttcgctttctgcgccgcctggatccaggtgaccggcatcccgtacgccgggtcgttcccctgcacgccgtcaatctcgccgtaggtttcgctggagggcagggccatcagtttatccgccggaatatccgcttcatcagcctttatgccgttgatgaaaatggcgtactgactgggcttaaggcggaagttttcccgaatgcggatctccggcagcagcacgccgttgccgtcagaaatcacctgccgcacgccgcgaatccgctgggtgagcgggttaccctgtgctttgtccaccagcgccaccagtttgtaaccgaggcttaaactgataggctcgatcagcggaatggtttcccaactgacctgctgctcgctggtttcggtgatggtgcgggtcagcgtttcgaggcttttctcttccgcctccgccgccagcggctgtttgctcatccgccagccggtaaaaccaagcagggcgctgaacagcaaaaacggcaggtgcggcattcccggtaccaccgccagcacgaacataatcccggtggcggtgtagagcaccgacgggcttgccagcagctggttacgcacgtcatgggcgatatcgccgttgtcgctgacgcgggtgacgataatcgccgccgcggtggagagcagcagggaagggatctgcgccaccaggccgtcgccgatggtcatcagcacatactgctggaaggcagcatcggcgctcaggttgtatttgaagatcccgatacagacgccgccgatcaggttgatcgccagaatcatcatcccggcgatggcgtccccgcgcacaaacttcgatgccccgtccatcgcgccgtagaaatcggcctcgctggcaacatctttacgccgggtttgcgcctgcgcctggttgatcaatccggcgttaagatcggcgtcaatcgccatctgtttgccgggcatcgcgtctaaggtaaagcgggcagaaacctcggaaatacgctcggcccctttggtgacgacaataaagttgattgtcaacagcgtcagtaaatccgagcgtgaaagcattatcgccgcgctgcacgggcagtcgattttcagtggcggcggattgtcgccgttaaataaaatcagcccgtctcatccgccaaaacctgccaccgtggcggtgccggaagagacggagaaaaaagcgcgagacgtcaacgagaaaacagcgctgctgaagaagaaatccgccaccgagcttggcgagctggcaaccagtatcaacaccattgcccgtgatgcgcatatggaagcgaatctggagatggagattgttccccagggattgcgcgtgctgattaaagatgaccagaaccgcaatatgtttgaacgcggcagcgcgaagattatgccgttctttaaaacgctgctggtggagctcgcgccagtgttcgactcgctcgataataaaattattattaccgggcataccgatgcgatggcctacaaaaacaatatctacaacaactggaacctttcgggtgaccgcgcgctttcggctcgtcgggtgctggaagaggccggaatgccggaagataaagtgatgcaggtaagcgcaatggcggaccagatgctgctggacgcgaagaatccgcaaagtgcgggtaatcggcgcatcgagattatggtgctgaccaaaagtgcgtccgatacgctgtatcaatactttggtcagcatggggataaagtggtgcagccgctggtgcaaaagctggataagcagcaggtgctttcgcagcgaacgcgctaaatgctgaatctttacgcatttctcaaaccctgaaatcactgtatactttaccagtgttgagaggtgagtaatgcgtaaaatcattcatgtggatatggactgctttttcgccgcagtggagatgcgcgacaatcccgccctgcgcgatatccctattgctattggcggcagccgcgaacgtcggggggtgatcagcaccgccaattatcccgcgcgtaaatttggcgtacgtagcgctatgccgacagggatggcgctcaaattatgcccgcatctcaccttgcttccggggcgctttgacgcctacaaagaagcctcaaatcatatccgcgaaatcttctcgcgctacacctcgcgtattgaaccgttgtcactggatgaggcttatctcgacgtcaccgatagcgtccattgccacggttctgcgaccctcatcgcccaggaaatccgccagacgattttcaacgagctgcaactgacggcgtctgcgggcgtggcacccgtaaagtttctcgccaaaatcgcctccgacatgaataaacccaacggccagtttgtgattacgccggcagaagttccggcatttttacaaaccttaccactggcaaaaatccccggcgtcggcaaagtctcggcggcaaaactggaagcgatggggctacgaacctgcggtgatgtacaaaagtgtgatctggtgatgctgcttaaacgctttggcaaatttggccgcattttgtgggagcgtagtcaggggattgacgagcgcgacgttaacagcgaacggttgcgaaaatccgtcggcgtggaacgcacgatggcggaagatatccaccactggtctgaatgtgaagcgattatcgagcggctgtatccggaacttgaacgccgtctggcaaaggtaaaacctgatttactgattgcccgccagggggtgaaattaaagttcgacgattttcagcaaaccactcaggagcacgtctggccgcggctgaataaagctgacttaatcgccaccgcgcgtaaaacctgggatgaacgccgcggcgggcgcggtgtgcgactggtggggctgcatgtgacgttgcttgatccgcaaatggaaagacaactggtgctgggattatgatgtatactattatgtctattctggtgtgcattattatgaggggatcactgcatgcatcgaattctcgctgaaaaatcggtcaatattactgagttacgtaaaaacccagctaaatactttattgatcaaccggttgcggttctttctaataatcgccccgcaggatatctcttaagtgccagcgcattcgaagcgttaatggacatgcttgctgaacaagaggagaaaaagcccataaaggcgcgcttccgtccaagtgctgcaagattagaggaaattacacgccgagctgaaaaatatcttaatgatatgacggatgatgatttcaatgactttaaggaataaggatgcgggtattcaaaacaaaacttattcgcctgcaacttacagcagaggaacttgatgcgttaacggcggattttatttcctataagcgtgacggtgttttgccagatatatttggtcgcgatgcactctacgacgactcgtttacctggccattaatcaaatttgagcgagttgctcatattcatctggcaaatgtgaataatccatttccgccacagttgcgccaattcagcagaacgaatgacgaagcgcatttggtatattgtcagggtgcgtttgatgagcaagcatggttgctcattgccattctgaaacctgaacctcataaacaggctcgagataacaaccaaatgcataaaattgggaaaatggcagaagcgtttcgcatgcgtttttgaatttatattatgaataacatacaaataagagactatcagcctggcgattttcagcaactatgcgctattttcattagagcggttacgatgatctccagtcagcattattcaccacaacaaattgccgcctgggcgcagattgacgaatctcgctggaaggagaaactcgcgaaatcacaagtgcgggttgccgtcattaatgcacaaccggttggttttattacctgcgttgaacgttatatcgatatgttatttgttgaccctgaatacacccgccgcggggttgcctgcgctttgttaaaacctttgattaagtctgaatccgaacttacggtggacgccagcataaccgcaaaacccttttttgaacgttatggttttcagacagttaagcagcagcgcgttgaatgccggggaacgtggtttactaatttttatatgcgatataaaccgcaatattaaatccagcttgcaatgaaaataacgcccgcctggtatgtgcgcgttttcttattccacaaactgcaaggaggtaaatcatgacaaatcctttatcaatgactctttgcagacctttccaggattaattctttttttcttgccctggattcgggtaatgactccaacttattgatagtgttttatgttcagataatgcccgatgactgcacgttaaatcatatcaggcgtaataccacaacccttaagttagcgcttatgggaaaaaccccctcttaactcggtttatccccgctggcgcggggaacacaaaaaggcgatttttctctttgattacaccggcggtttatccccgctggcgcggggaacacatggttgtcgattttttcccggcaggattttgcggtttatccccgctggcgcggggaacacaccccgttgttagagtcgggcgaatgctatcgcggtttatccccgctggcgcggggaacactttttgttaattgcgtttgccacggtttgcaacggtttatccccgctggcgcggggaacactgagcgtcggcggctcgctggatttgcgcggcggtttatccccgctggcgcggggaacactacgtggagaatatttgcaacacccgcaagaacggtttatccccgctggcgcggggaacactcactgagcctcgcccctatgtgatgcaaattcggtttatccccgctggcgcggggaacacgccgccatgtcaggaacaccagagccgcccgacggtttatccccgctggcgcggggaacacacgccgccgccgttccggctggccgtctcctgcggtttatccccgctggcgcggggaacactttcagcgcctccagcactcgcaccgccagcgcggtttatccccgctggcgcggggaacacattttgatttgcacctaatccgaccgcctggccggtttatccccgctggcgcggggaacacatatacagggctacaatccatgtgaaaatttccggtttatccccgctggcgcggggaacacttagttgtaactctgtgaatctcgggatcgtccggtttatccccgctggcgcggggaacacaaaacccagcttgtactgaaaatgatagacgtcggtttatccccgctggcgcggggaacaccctgcgcgtcaaaccattctttcggtgatacacggtttatccccgctggcgcggggaacactactgtaacgaaatcggttagcggtcgggtgtcggtttatccccgctggcgcggggaacacgagtcgacgtttatcaatatcagttgcaccggcggtttatccccgctggcgcggggaacacgggattatcaacgaggtcaaataatttactgccggtttatccccgctggcgcggggaacactactgtaacgaaatcggttagcggtcgggtgtcggtttatccccgctggcgcggggaacacgagtcgacgtttatcaatatcagttgcaccggcggtttatccccgctggcgcggggaacacgggattatcaacgaggtcaaataatttactgccggtttatccccgctggcgcggggaacacatgatgaattttttcaggacgaagtttttcgacggtttatccccgctggcgcggggaacacataatcgcccaggcgcgaaacgcctcgaacgacggtttatccccgctggcgcggggaacaccagtgctgtaaacgattgaaccagctgatccagggtttatccccgctggcgcggggaacacccgcgattcatccagcacggcaatttaatgttcggtttatccccgctggcgcggggaacacactaagcatacataactgtttttaaacaaatttattccgcatcaacaatctaccaactaaattaaaacatttccttatttttaaagaacggataacttattgattatcaacaggaagaaaagaaaccaaacgcaacccatccaaatccaccggaatacgtctattttcaccccaggtctgaaattcaaaacctgactcggtattggtcgcccaagccatcactacatttccgcaacctgccagttgagagatttgctgccagatcatctcccgaatacgtttggatgtatctccgacatacacaccggcacgcacttccagtagccagatagcgagccgtccacgtaaacgtggaggaacattttccgttacaactacgatcatactcatccgccgcgtcctcgatgaccgctatcgcctaaggtttcaggttcagggatggcaggcggtaacatatccggcgcgggttgtggtggttcaatttcaccagcggcaagcacttcctcaattaacggaattaacttgcccgttaatttactactacggaaaatatcgcgacaggccaacctgacttctttatctggttctgcgggttgcctcgctgctatttcaaatgcctttggcacaaccaaatcaaatttaatgatatcggctatgtcataaacaaatgaaagcggtttgccgctatggataaaaccaatagcgggcgcatatcccgcagctaatactgcagcttcagaaataccgtacaggcatgatgtggcagcactgatgcaacgattgacaacatcgcctttttcccagtctttaggatcgtatttgcgaccattccatttcacaccatattgtttcgccagtaatgcatacgtctggcgaacgcgggatccctcaattccccgtaactgctccactgaacggcgagctggcggtggctcacgaaaacgtaattcatacattttgcgcaccaccttcaggcgtagatcttccgttaaagccagctttgcctggtagagtaacttatcagcacgcgccccaccgggttgtccggaagagtagacgcgaacacccgcttcaccgacccagaccagtagcgtccccaccgtggcggccagatgcaccgccgcgtgggaaactctcgttcccggttcgagcataatgcaggcgaccgatcccaccggaatgtgcgtgcggatcccggttttgtcgatcagcacgaaagcgccgtccagtacgtcgatttgaccgtactggaggaagatcatggaggtgcgatcttttaacgggatcgggctcagcggtacaaacgtcacgcctctgctccaggtttgatcagcatcagaccacaaccgaacgcccggcttttgccatacccctgactgagacgttgcagaaataacccaggatcggtgaccgtaagcatccccgtataatccacactactgaactggatcagttgccaggagttttcccgccggggttgttgttgtcggtaggcatcaaccgaggtatccagtagtgtaaaaccacttctttccccctgcgctgccagccagtccagcgccgcctgttgttgatgcaaccagacatcacttccttccgcctgtcccctcacctgccgtttcgcctccatcagcagatcgtggcgcttgcccgctttacagattgttggattcgcccgcaggttgaaacaaagttgttgtccggtactcagctcgggcgtaaatgaccggcattcgatggtgaaagtttcactttccgccgggcgttcctgcgagaggacaaaaaagcgaaacgcgccctggagttcttcccgacgataaagaaattgcctttctttgccgccagggaagagatcccacaaccactgatgcatcacatattcaccgcgatccaccagatgcagcaactgcgcaggcgaaagctggccggtatgtaaggttattcttgagaggtacatggttcctccttgctgagccacggcccctgattgatggtgcgttccccaaacagccactgctgacgatttaaaggaacatcccggcggcgtaatattttgcttgcgaccaaaccatcgtgctccccttcccaccagcattcatcctgaagtttcgggagtgagactttcagttcgcggaaacgatcctgatactgttggtatgcgttacgtaagacatcagacgcgttgccttcgagcagtaacggcgcaagtggtaacgccagcggatgactttttcgccccagataaagcggaaaaaccggatggcgtaaaccgtcctgcaactgttcgaggctgtaaggcgcatcgggggttgttgccaccgccaccatccaccaggcatcggtgtagtagtcgcgccgggagataatcgcgctcaaaagctcagggtcgctcaactcttcgcgacggctgaaataacgtgctttacgcacctcttttggcatctggaccgtgtgataatcccgtgcccagcgcgggttacggctggcgcaaaccaccagtgaatagtggcgattaaacgcgtttaagcgttcggtatcatcacgccgaatccctaccccggcagccagtagccccagcaatgctgagcgcgaaggaagttcatgggtatgacgaacttcacctggagcatcgacaccccaggacgccatcggcccatgaagctgaaaaatcagatattggctcataagccgccccttacgcgcagataaagtccagcacgtccttcatgcttccctgtttgttcatcacgtcaaaacttgcgtaatcggtcttctgttcgtagaccgtattcatattttcgcgaagagttgtaatacgctgcaccgccacctctaactgacgggtgccattaatgggttcatagaaagctgccgccagagaacgcggttgatcggtgcctttttctgccagcgcccaggaggcgtaggcacggctggcaaagctgttctgtttgccggttggggagactttaagtgcggcttccgtaaaggcacgtatggtctgattagctaacgcttcgtcaccgccaaggttttcgaccagcagatctttatcaatgcagatataggtgtagaacagtgcagaaccgaatccggtttcaccaagatgcccggcaccggcatcttcagaagcctggcgcaaatcatcaacggcggtgaaaaaatcatcttcgacaatcgtttcactgacaccaaatgcgtgcgctacctggcaggcggcttcaacattaaactcgggtttattcgccagcatacgaccaaacatggcaatatctaccgccatacggtctttgcgtaacaacgcgagatcttcctcttttggcgcgcgcttttcttctgcaagctgatgggccagcacttttacggcgtcaaattctgccgggctgatatggactaactgttcagtttcggcgttagtgagcggatcttttggttttttgtcgtttttagctttcccaagataatctgcaatttttgccgcccattcgatggcttttttctcttcgattcctttctcaatcaggatagttgccgcctcacgcgcaatacgcccactgcgaataccaatatggcccgccagtgcctgttcaaaaagtgcagaagtgcgccacgcacgtttcagactttgcgaggaaacgcgcagacgcgttgctccacccagcaccacagtttttggcgcaccggtatcatcacggttaaggttggcagcagggtaagcggttaacaaatgaagctgaataaatgttgtcatgagatagtcctttattgattttgttcgttatcggcgtcgccagcctggtaatattccagcgcccagcggatacggataaattcggttggccgctgctggcggcggtgatgattgagcaggtcgtcgctctcctggcaccaacggaagaccccctctgccagagagtcaagattgacggaaccgtttaataatctgactgcgcggcgtaactggcgcagtaattcatccggtgtttttactgccgacagacgagtaaaacgcccctttgacattaccgccgccagctgcgcggcaaaaggctgccgttcatcaatagctttaacattggcgctaactgcggctatcagcgccagtgcggtgatacgccactcaggttcatcctgccactttatttgtctgttcttcagaaacaggcgaaatccatccgtcagacaaacatcattaaccgtcgtactacgccgcagactggcacgttcgccacgtttctcctgcaattcctcgtgccatttgcgcagcgtggctttgtgctcctcttttacaatactcattcagcagcctcctgctttttctccctggcggctttagcactttgcttctccgccgatgttgtaaaatatttcttgcgcgcggtcatgacgcgttccagatcaacgggctcataaggattggtgaatacacgctcgtcaaaatcctgacgtgcgaataaccaaatttccttattccatttgctgagtaattcatccgcatcctgaccttcttcaatttggcgcactaacctcagaaagcgatgctgagttttgttccagaagtcgatatccacaaaactaaaatcaccccttgcaccttttggatcggagaaccatgcttctttcaatgcactccgtaacagacttagaatccgtgaagctgtttgcgcagccagccgcagcttcggtatctgaccttcttttttatcgagcagcagcgggaaatggtgttcgtaccaacagcgcgctttcatgttgtcgaaatcatagccaaatccccacaggcccacttttgcctgcttgagactgctggcattgaagagtttcaccaccagcgcgggaagttccgtattgttttctgatttacccgtttcgataaggcctaaccagtcacgccagattaaaccgcccggttgtggtttaacggagtaaaactcgccaccctctttaagtggtacacggtaaggcgttaagggatgctgccacatggcataattcgcaccgtaatttttggtcgtcatcaggctcaggagcgcgtcgctctgctcaccgcaaatatcgcagttgccgactgtcgtggtattaaaatcaatacgaatacggcgaggcattccccagtacgcctggagtttattgacctgctcatcggttaccaccgcaccggccagttcgctggtgcgcgtcgggccaagccaggggaaaaccagatcgtcaaattttttgggtagcggtaaatcggcttcatcctgcggcatgacattgatccacagtttgcgccacaagggagtttgttgattaccctgatattcctgtaattcaatcagagtggtcatcggcccaccgccgcgtaaaccggtgcggtagcctttgccacctgacggcgcattcaactgtagggagaacagagctaacgcagaacaatgtgggcacaggtattccgttacaccacgcttgataaagtggtctttattaaacttcgttgtttgagcgccgggaatctcaggcagtagcgaagcgaccggaactttatctccggtgagcgcctcgaaatcctgcataaatgaaggggaatctggcccaaactggaaagcatgttctaatgactgcaatgcttcccgtagcttttcagcttccagtccgtcttcccagatatcatcccaacgacgatgatcttttggcgcgaagctggtttgtagtagccccagcaaaaactgccataccgcaccctggagatctgcccgcggcgcagaaatatcgacaacattttcatccgccagatcgactggcgccagtttgcctgtcgttccgtctttaaaacgaacgggcaaccacggggttgtcagaagtgaaaacgagttcatacgcatcctctcgtaaaaaagaccatcccaggtcggttgtccatctttccatccttttcggtgtatcaactattcagagagtcctgtcgcagacatctcaaccaaccttgccaatcaatccttccgtagccgaatacccgcaactttcgtcatcgttgactaaaatcacgtttgccatctccggatcttgtcgctgttcaatgcaccacagcctgaacgcctctccctccagtaaagaaaactcatcccgatgttttttccaccagcttcggcgcactctgacaacgctcatttcccatgcgtgagcaccggtggcataaggcttcaccacaccgtcaatacaggtagccagccacagggaaacagactcctcagccagacgtgtcgacagtttttccgggaggtaatcgttgatattggcggcatagccgggcctgaagttcagcacaaactttttagccattgcgcgatcacagtaatatttgcccacttgctcctgctcgctgcgggcaaatccttccggcattaccacgtcctcaccgtagacggattcaataagaagccgggctgcgtgtggcatctgaatagcaccttgctcacgcagcacacgctgcgtcagccagattcgcccatgatcgggatagacaaatgcactgttacgcatggcactgccaaaccattcgtcgccaggagagtcgtcccagacgggagccagaatcagcaattcagggggggaacgctcgtcctttccgtcacgctttaactgaccattaatatcgcggatatgccgctgtaatcgtcctgctcgctgaatcagcaaatcaacaggggccaggtcggagatcatttcgtccaggtcaatatccacgctttgctcaattacttgtgtacaaacaatgacttgcgacgctctctgtaaactacaatatttaccaaagcgtgccagcgtttccgtttcaattcgctggcgatcgctaaaagcaaagcggctatgaaaaagtgaaaggctggaagcaggaatgacgccgcgggcaagcagctgacgatgaaccttaatagcgtcatcgacagaattccggatccaggcgatgcatttcccctgacttaccgccgattcgatacgcgcaatacactcttgttcactatgaagccaacccacgctgacgctacgctcaacgtctttgcgcgtcgctacccggtgtgagttcacatcggatttcgtgacatgcgtcagccaggggtaatcatccttttccaggaacggagcttcttgctggccctctgtaccccgcgcaaaggcagcgacgagtttgtcgcgctgctgttgagataacgtggcagaaagcaaaataacgctgtttccgccacgcgcctgccgctcgatcaacccttcaagaatgcacgacatgtaagcgtcacaggcgtggatctcatcagccagcaggattttgttactcagccccagaagccgcagattattatgtttgaacggcatcaccgccatcatcgcctgatccagcgtgccgacgccaatttcagccagcaacgccttcttgttactgtcggcaaaccaggccgcacatccctgactgaacgtttgttcatccggttcttctgacccgactaaatcaccagaccagagtgattcattaaagcggtccattaatgtgcgggcactatgtgccagcaccaggctggggcgggattctggcgaatagaaagcaagccaggttttgaccagccgatcgtacatggcattggccgttgccattgttggcagaccaaaaaacagcccctgagctttccccgcagctatcaacctgtgcgccaggataagcgccgcttctgttttacctgcgccagtcacatcttccagaataaataactgcggtccttgctggctgatatccagatccagcaccttttgctgtaacggtgtcggattctcaataaaaggaaacagcgtattaattccgttgaaaggcgcgacttttgcttttagaggaaagacggttaaggcgttttgagcctgaattaaagttttctgccagtaacctttaatatccattgggtgtgcgacgcgtggaaaaaatcgcgttgacgaacccgtccagtctgcgagcacgacggttgcagagatataccaggaaaggtgttttataagttcaatgccctcatcatcatcccagaatgcggggatctctatgagcggaaacagtggtttgatttcaaggagaaaatctcgtgctgcagctttgtcttcaggcagaaaattatccaattcatccatacgatcagggggccgaccatgatgccctgtcgtcacgggcatccacatttctatcactcgcctaagtttgcgcggagagagcgaagatgaaggaagtaactcctgacattcacttaaataatgattccacaaccagtagcccagcgttgaatgagagattttttcgtaattttttctggcaccttcctgaatcttgagttcagggggcaggtaaagttgttgaaaagagcgggcaaattttccaatatcgtgccagcacagcaaccaggcgaaaaattgagccgcctgttccttgtcagaaatccctaattgacgaaaataatcagccagcccgaagcaatttcttttaaccattaaatagcccatcgcggctacatccagcgaatgccagcaaagaaggtgatagtcgtcgcccccgtctttctcgccgcgtcgggtttttccccagaaatcaaaaaaagtcacaatatttttatccttcagtaaacttaaaggatatttacgcatatattaaaaattatctgtgatatatatcattcaataaaatatttacattatgaataatcaaataattttcatccgtaatatatatgaataataaacataggcataatattcacataaacaatataaattaaaaaagggtgcaggagaccaaaccatcacaattcagtacgcggggttttaccccataagcgctaacttaagggttgtggtattacgcctgatatgatttaacgtgctaaaaaatcagcagcatacagtttactggcatgcatacgctaatgcgacagagcccccggctctggagcgtctgtgcctgccgcgcgcggttcgccgggccgccgggcacgaatatcgggcagaccccggcaggcatcgttccagtgcgtgccccgttcggggttattggccagcttactgatccaggtttctgacacattccagcggcgggccagctccttctgcttccagcctttcgccctgagcagtgcccgccactcctgcggggaaagcggcgccgccgtgatgccggccgcatgacaggtcgttttcatcgcgtatgctcccggccctaatcctgccccggccgtgccggctggatttgacgcagtattgttgttgcctgccatcccgtaaacccgaaggtatcggccagttcgccgggcagtgacgcggccaggcgcggcagttcgtccggggattcattgtgaaagacaaaacagaccccctcatccctgatgcgcgacatcaacatcgcaataagccggtgcggtccctcatggctggcgtgttcagtgaccttttcagtaaaccgccggggattgctgcagctgatgccccggtcggccaggaacgccagaaagcgctgcaggaaaccggggagatccctggcggccagggcgggtttcagcaccgcttctgcctgggcctgtgtgaagccaaacgccgccgccagctcaggggaaaagtccggcgtgtcagcgctggcctcaaaaatgacgccatcgtttatggcctgctgcatgtccgggggcatattcccgatcatattttcacgcacgccccatgcacggccggcgctttcggtcagtctctgcggatcgctgcagctgacgccccgctccgccaggaacgtcaggaaacgctgcaggacggcggcgccgatcttgccggagacgggcgcttccccggagggatagaagaccctgacgttggtgttatccagtaaggcctgttcagcgccggcgccggacccggtgctttttccgctccgccaggccgtattatttcgactgacgatggcaggatcgacatgttcgctgtctacgatgctgttaatgaacgtcactgactgttcttcgctgaaatcaaagtcgcgctgtaacagggacagcagcctgtcatgccagtcatctttcacgcgactggcggcattaaccatgaacgtgacgttcagtacaccggccagtaaacaggcagcctggtcggccacatacaggctgaagtactccagtaccgcctgttcaaatgcagcgggatcgcagcagaccacttccacagctcccagcgactgcagaaaccgccgggtgttttcggtcacagcgtcggcgggattgagggcgatggcgcggccgcgctgtgactggatgtcaaatgtgacgatacgctccgtgacgggcatccggccgtgatcggcgatgaagcggtaaagctgctccaccgcttccgtggcggtcatccccattgcctccagacgcagttcggcgcgtttcttcagctgctcatcgagacgcacggtcagctgggcgtttttggcccgctttttacgttcaaaaaaaccggtcatgctccttcctttttgtacagtcatctggctttacataatgtacagccatttgtaccgcacttttgcgcgcgggaccacattttttcgccgttgcggtttagcggtattctccgcagcgccgccacttatccaccgtttctgtggataacgctatatgtagtggctccgttagctggaaacggcacaagatatggtgtacgtgccgtcagtcgtgcgaccgctcccctgccttcctctccctgttgatttcgctttttgcggtatttgcgttttttccgcaatggcggcgccggccaaaaggtattttccggtggttgcaggcgtaaaagtcacagggtgaaaagataagggggcgaatcatcatgcggggtaaatcgtgcggtcgtcacgccgcgtgatgattacaggtgtgtcgctttgttgaattagcttttagtgctaaatctaaatatttataatatacgaatgaaacctaatttattagagtgtggttattcagtaaacaacggcaagcggagtgaatggtatggaatatgaagcgtacaaggttcgcggctacggcttcggactgaagaaagagatcaccggcgtgctgggtcgttaccccacgcaggaagaggcgcagaaggtcgcggacgactacacgcaggcctgcctgccggataacctgccggacagctacgatatgggcatggtccggccggtcgctgccggcgaacctgccgccctcgatacagacgtttttcgcggtccgggcgcgccgttcatgatggatgccggccagctaagcacaggtcaaaccgtatgcctgggcaaagcggcggatggaaaacggttttatgtcggcggggagcattccggtggccagtgaacaatgtttaacagagagggggttatgatgcgtcagggggtgatttctgccgttatatatttactgctggcaatgctggtcatgatctacatgccggagggttactccgcgattagctgggccataggcgcggttgtggttgtgacgctgatttatattcgtgcccgtaaaggagaggattgatggccaccaagcatattaatgacgagctctggcatcgtattgaagttctgaccgtccgggcaaatgccaggcaaaacctgatccgcccggtcaaagaagcggacgtgcttcatctggttctgcagcgtggcctggagctgcttacagacgacgatctgctgcagctgggcaagtaccgccggcccataggatttgtgctgcgtcggccgggcatggagatgctgaagctggacacactgagtatggctgacgctgctactatcctcatgcgcagcggaccggcaacgctgtgcatctggagtcgtgacgatatcctgcggcaggccagtgaagcggtgatccgcgaacggctaccggaaacggccctgctgtcggagggggatgaccgggcccggttccagacgctgctgcctggcgtctggaatgccgcgaaccggggcgaaacggccgtgatttccctgcgtgctgacaatgcggatctcgctattgcacgcatcactgacctgatgtgcgaatccctgctgggttataaggggcagcgggcataccgggcaggtgaaaacgaacagggagaagagtcatgaacatgcgaggcattctttttgtactacttctgggaggtccggagcaaaaacgtgcagcagctggacagtcgtgctgagctgaccggagatgagatcagtgcaattcagaaactggccgcggacagttctcggaccgacatttgatgaaatgaatggatctgaaagaaatattccaacaacttccggtagctcaacgtgtcgggggaaaattccaccttgacggcttccgcatggccgggatggttgcggtagttcggatagtcgttccgaccaccgatatagcccacttcagtgttgatcacgccatcgagtttacggagcagctcatgaactccccagaaacagccaccggccagaattgccacgtcagtttgcatgtttatctcctttctcaaaaagggcgagataatcgccataaccttccgctgctaactcggttttcggaataaatcgcagtgaggcggaattaatgcagtaacgtaatccaccgacatcctgcggaccgtccgagaagacgtgccccagatggctgtcgccgtggcgggagcggacttcggtgcgcaccatgccatgactaagatcgctcaggttacggacgttgttttccaccggcttgctgaacgccggccagccgcaacccgaatcaaatttgtcctctgacgaaaacagtggttcaccggagacgatatccacgtacagtccctgctcaaagttgtcgtcatattccccggtaaacggacgttcggtggcgtttttctgtgtgacgttaaactgcagctctgtcagcgcctgaacggcctgcaggtgtttttgatattgtttgctcatcgcgttctccttgcgaacattattcgccgggacggggccggttcatgaatgtgaaccacaccgggtttcttggatagtttttagcccggagacttagtctgcataatatttattcatctgccaggcataatacgtttgctctgcttcaactggagatacatagccgatacgttttagtaatcgtcggttgttgaactcgtctatccacgtctgcgtcgccaactccacatgttgcctatttttccagtgttgacgctgggtcacttcagctttgtataacccgtcaatgctttcagccaacgcgttgtcatacgagtcacctacaatcgtattctgttcctccaggcggcgaacctgcttttccagctcgcgaatacgttgctgctttgcagtaatgggatttgcagagggcgtaaaaccctgacgctttcgcctgagctggcgtacccagctatcaagcgtggtagaaccgacattcatcgcttcaccggcttgtcgatatgagtagcccttatcaacaatcagccgtgcacattccccctgaattcagggggaaagcacgcttatttttcttgttcattaagtcacctgttttattttgaggtgagaatatcacctttaatcgggtggacaaatttactgtgccactacacatcatgtaatcttactctgactgatggcttccattacatgtgatgaatataccactgcagcaccggcgttcagggaaacagctacggccagagccgccgcgatttcttctctggatgcacctgctttcaaggcagcatatgagtggatacttatacatccgtcacaccgggtcgtaactgcaacagccagggaaatcagctcctgtgtcttttcatccaataccccgtggcggtttgccgacgtcgcaatagtctgatatcccttaagggtctcaggaatttcgtctccgagtaagccgacatttttaagcaggttttttctatattcatcccaattcatattcatgattgtttccttatgttgctgagagggctttcaagccctgatagttaaatatcttttcaaatcatatttcagcaggacagcaccggcaccgattaacaggacatcttttatgatgaagctgtcaattttccccagttgtggcaataagctcagcgtggtgatacccgtgacgataacgatcatatcccccaatatcccggctgcaggtctgaagaaaccgataatcagtgccagaaaagtgatggtttctactacgccgaggaaatagctccctccgtgaacaccaaacaggatgtacaggatattcagccatgtggttgatatcaggggttcgagggccatcacttcaaaatcaaaccatttataggtcccgaacagcataaatatcgtgataaccgacagacgaagaataaccatgtcgtagtctgagcggataaaaccattaataaaatttttcattccattctccaggcaaaaaactatgccttataaaaaatcaacgggcatcgagcatcatcattaaagcgtctacggccccagaataagcatcgtgagggggcatccggttcagcatcagcgcgcccttcagcgcggagcagacaatgatggcaagctcatcaggagggactacggactttagctcgccggttttctgcccggaagcgaggacgtctttcagtatcagcatctccgtctgcgccagccggctgacagctttctgcagttcaggggaaaactggtgactgtccgacagcatggcgtaaacgccgcacatctcctctctctcggcacaaccggcaaacgcatcgagatacgccctgaggcgttgtacgccgggaggaatatcatggaggacggcatcaagctgaccaaataccccggttttgtattggcagtaggctaaacccagatcggttttccccgggaaatgatggtggatactggcttttctgataccaatcgctttttccagatcggcataactgaaacccagaaatccgcgttgctggatcaatgtatccgtcaggcgaagtattttgtcgtaagtagacacggcattttcctgatatgtatgaagggcgctgttatacgtaccttagcggtagataacggcggttccgtaaaatttatttttgccgtcaagcgaagtgatacgaaagtgagaggcaccgacctgttctgctctgactttaagcgcattagtcacttcgtctggcgttgacagattaccgacagaaatatggcctgatggcatcagatctgcagcgtcctgacggttaatttcatctgcggcggcgtagccggccagggtaagcgcaagcgcggcaatggtagtacggataatgcgattcatgggtgatccctcctggtgattaagcatgagtcaatctaccttctcgtaggaaggttagcaaggagtatttatcaaaaaaagagaaattacatatatcaatctgtttttgttagctttctcaaagcttaaagaagcatggcaggctcaacttaccagtaacatcctgaatttctcgcgatgtcagtcagtgttacaggctcgtggatggaagagagctttcactggcagtgacggaaatttcggcggttcctgcgcagaacaatagcccacctacggcgggagctaaggctctgttacaacggtgcttttttcagatgccttagcccgttataatcccgtgcatgtatatccccagacccgctaaactcctcttccagattgatgatggctggagcaagctacccgctaaacacggtgaattcatacccgaatggacacaactggtcgtcgagcgcatgctcgcctgtggtacccctgccatgggattacgccgatactgctgcgcatctccccattgcacacacaccaaatacatttgctacagctgtaaagggaaaggctgcagtgcctgtggcatgaaagccaccgagcaatggattgccgaacagcaacacatcctccccgactgcgaatggcaacacatcaccttcactatgcccgacaaactctggcctctcttcgccaacaactggcccctgctcaatccgttattttcttgcgcggcccatatcctactgaaatgggccaaaaaactcggcgtagaaattggtctgttcgtggcattacacacctatggtcgacaacttaaccggcacccgcatattcatttatccgtgacccgcggcgggttatgccttaaacacggcgtctggcggccgatttacttcaaaaagaaagtcgtcgaagcttactggcgtcaggccgtcattaaactgctgcgggaaagctacaccgagttagatttgtccgacgccaactatgcacatattcgtgactatcgtgagttgtgccagttccttgatggttaggaaactgaatcatcgttttaaaaatttcctgaccatgaacagcagtgtctgtcatgcagtaatgatgtgccatcgggaacgttatggtcataaaatggcatttccggcgcgtttttaacctgaaagctgtttttcagacgcacttatcccgcagtctgtgccagaagccatcgtttccggtcgatgttatgcagcctttctgccactaattccgtggcgtgtctgccggcctgcgcactgctgaagcgcagccggttgccgcacaggatgcatttgtacggatccgtacgcagaaattccttcatcagcgccacgaagcccggcagctccggttttttcctctcttccatttgcagggcctcatacaccttcggcagcagcgtgccccgtttacggtttgacaggaagccgtagtagcgcaccattttaaaatgcttcgccgggatatggctgatatagcgtccgatcatctcttcctgcgtcagcgtctgctgccggtactgctgtgtacgatggtcgtaatagtgatgcaccacggccccgccgctgtagtgcctgagctttgccgccgacacagggggccgtttcaggtaccggcccagatatttgacgcttcgccaggctccccgggtcttcttcgcaaagtggactttccagctgttaccagcggcgtccgtactgcgcctgcagatagcgctgccactgttttttatcgcggatatgccccagtcccggcaacctgccgggattaatcaggtcatagctgtggcgcagcagccggatgacagctccgcgccagatttcctccacggcatgctttttaaagaagagctcgcgccagacgccgtgtttaatatcaagcccgccgcgggtgacggagagatgaatgtggggatgctggttgagctggcgaccgtaggtgtgcagggcgcagaagataccgacttccacaccctgttttctggcccagcggagcatggcgcgggtggcggcacggaacagggcattgagcagaggccagttattgttgaaaaagggccacagcagatggggcatggtgaaggtgatatgctgccagtcgcagtctggaaggatgtggctctgctgcgccacccactgctccgtggccttatgtccgcaggagctgcagccttttgatttacaggtctggcagaagaagcgggagtgggtgcagtccggtgaggcgcagcagtatcgcttcacccccatggcagcagtgccgcaggcgagcatgcgctcgacacagagaacggtccaggggctgagagtgtccccgtgtttatccatataccggttccaggcgtcatcaatggtgaacagcagttttgccgggcgcgggatatacatgcggcggattatcgctctgcagggctctgtcgcattagcgtatgcatgccagtaaactgtatgctgctgattttttaggtcatcgggcattatctgaacataaaacactatcagtaagttggagtcattacccgacagcgaggtgtttagtgtgccatgtcaggcgagaaattctattggatgaatcaagtccaacttactcattgtcaatttcatggttgattattcgaaacgtgatgctatttccaacatcaacgctataattgcagaataattgtagatacatttttgtatatacaattagggatggcaattatgccaatggagtttgaatgggatgaaaacaaggccaaaagtaatcgggtgaaacatggcatccgctttgaagatgcggtgttattgtttgatgatccacaacatttgtcacagcaagaacgcatagaaaacggtgagtatcgctggcagacaatcggcctggtttacggcatcgtggttattctggttgcgcataccatccgtttcgaaagcggaaatgaaattattcgaatcatcagtgcacgaaaagcagatcgtaaagagaggaatcgctatgagcatggttaaacataaacgagggacctcctctacactcgatgtgcagcatgaggccgaactgaaggcgctggcgaataaatccgacgaagatattgattacagtgatatcccaccttccagcgatgagcaatggtctaacgccgaacgcggtaagttttatcggccattgaaaactcaggcttcggtgcgtattgatgctgatgtgatggaatggttgaagcgaccaggtaaaggctatcaaactcgcctgaacgcaattttacgtgaagcgatgctgcgcgatcagaacaaaaaataattcaggccgccacatggcggccatcatccaaaattacttcctcaaccccgcaaacgctgcccgaatctcttcctccggcaactgaatcccgataaacaccatcgtgctatgcggtttttcatcgccccacgggcggtcccagtcggcgctgtagaggcgttggacgccctggaatagcaggcggttaggttcgccgtcaatccatagcatccctttgtaacgcagtagtttatccgccgactccagcagcaggttttccatcacccgggaaacttcgctgatatctaccgggtaatccagttccaccacaatcgacgaaatatcgttttgtttgtccgcgataaagtggaaacgcggtttggtgctgacgacgttttcttccagcataaaaccgttggtgttgaacagaaggcccaggtcgatatcgccgtgggtaacggtgtagaccggtgcgcgggcgttgatgcgcgccaggcgttcacgcagtttctctgcttcgcctgcgacgtcggttttcgtcagcagaatacggtcggcgtagccaacctgggactgggcgatggtgaactggttcatctgctcatcggcatgtaccgcatccaccagcgcaatcacgccgtccagcaggtagcgctggcataaaatctcatgggagaaaaaggtctgaataatcgggccgggatcggccatgccggtgcattcaatgaccagacggtcgaactgaatattgcccttgtcgagattatccagcaggtcgagtagtgcgtcttccagctcgttggagcgcgaacagcagatgcagccgttggtcagcgttttgatctgcgtggcgcggtcgccaatcagttgatcatcaacggagacttcgccgaattcgttttcaatcacggcaatcttgtagccgtgttgttcgttaagaatatggcgcagcagggtggttttgcccgcgcctaaaaaaccggtgagtagggtaactgcaatcgggttcatgctctctccattaacaacagcgcataccgcctttaccatcgccgccgtagcgtgcgttctggcgttcgcggaagaattcttcatagctcatgtacggcttgtcgggatggttggtcttcatatgctcgacgtagttgtcgtagtctggaatgccaatcaacatcttcgccgcctggccgagatatttttttgcctgtcctaagttaccaaacatagttcactctgataagaacaaagccccgccgaagcggggctaaacacggttagtggtgcgaagagatcttcacgccgccttccgggattggaacgtacggtgtttctttgtcagtacgtttgtcgctgttacgcaccgcaagccaggttttgaaaccgtagaagatgatgctgtacaccacaatcaggaacagaatactcagacctgcgttggtgtagttgttcacaacgatgtggttcatgttggcaatctgctgcgccgtcaggtcagtaccgttagcaatcttctctttgtactggcttgccatgtagaagaagccttccatctgcgggttggtgctgaacagtttcaggcccagcgcccaggtggtgcagataagcagccatacagccggaacaacagttacccagatgtattgggtgcgcttcatcttaatcagcacaacggtgcccagtaccagcgctacggctgccagcatctggttggaaataccgaacagcggccacaggctcttaacgccgcccagcggatcgaccacgccctgatacagcaggtagccccacagacccacacagcccgcagtaccgatgataccggcaaccagagagtcggtttttttcaggaacgggatgaagttacccagcaggtcttgcagcataaagcggccagaacgggtacccgcatccagcgcggtcaggatgaacagtgcttcgaacagaataccgaagtgataccagaagcccatgtcagccatcggcagcactttgtggaacacgtgagcgatacctaccgccagcgtcggcgcaccacctgcacggttcaggacagaaggctcaccaatgtctttcgcggtttgcaggatctgctctggcgaaatcacgaagccccaggagctgacggtcgctgccgcgtgtgcggtaacgtctttcagctgcgccatgatgatcggcgcgttctcgccacccatttcatgcaggttaggcatggtgatgccaaggccagcaggcggggtgttcatcgcgaagtaaagacccggttcgatgatggacgcagcaaccagcgccataatcgccacgaaggactccatcagcattgcgccgtagccgatgaaacgcgcgtcggtttcattagccagcagttttggcgtcgtaccggaagagatcagcgcgtggaagccagataccgcaccacaggcgatggtgatgaacaggaacgggaacagagcgcctttccacagcgggccagtaccgtcaatgtactgggtcatggcaggcattttcagttccgggttcagcaccacgatacccagcgccaggccgacgataacgccgattttcaggaaggttgccagatagtcgcgcggtgcgaggatcagccacaccggcagcagtgcggaaacaaacgcatagccaatcagcgcgaaggtaatggtggtgtctttaaaggtcagtgccggaccccagtacggatcgtgagcaatcacgccaccgaagtagatagaggcaaccagcagcacgataccaatgacagagacttcacccacacgccccggacgaataaagcgcatgtagatacccataaacagcgcaatcggtacggttgagcaaacggtgaagacaccccacggactttcggccagggctttaaccacaatcagcgccaggacggcgaggatgatgatcatgattaagaaacagccaaacagcgcgatagtccccggtactggtcccatctcttctttgatcatctcaccaagagatgcgccattacggcgagaggagataaacagcaccataaagtcctgaaccgcaccggccagcacgacccccgccagcagccacagcgtgccaggcaggtagcccatctgcgcggcgagaaccggacccaccagcggaccagcaccggcgatagcggcgaagtggtgaccaaacaacacgtaacggttggtcggaacgtagttcagaccgtcgttgttaataaccgcaggcgtcgcgcgcgtggggtcgagtttcatcaccttctgggcgatgtacagactgtagtagcgatacgccaccagatacaccgatacagaggcgaccacgatccacagggcgctgacgtgctccccccgacgtaatgcaactaccgcgaggcagaatgcaccgatgattccgagaatcacccagggtatgtgcttgaatatctttttagtatccatagtaaaacctggcatgtattgattaatagttggccgaagccgttctaggtttgcgttgcgtttgaggaggtaaattgaccgctatcctgtagtgatgttgccagagttacgcgcgcgtaaagtaaggtaaataactgagtggttattttagggatgtaagcggtcagttttgcggttgagcggcaaaggcgtcgtttaagtgacgataaatatgtgattcatatcacatatttatattgtgaataatttatgtaaataatggctttttaaattcagagtgtgaataaaattactcggcgtaatctccgcgggatattcataaagtttttcctttccaggccgaaaatcttgcatcggtccacaggaaagagaaaccatgttaaaacgtatcaaaattgtgaccagcttactgctggttttggccgtttttggccttttacaactgacatcaggcggtctgttctttaatgccttaaagaatgacaaagaaaatttcactgttttacaaaccattcgccagcagcaatccacgctgaatggcagctgggtcgcgttgttgcagacgcgtaacaccctcaaccgcgcgggtatccgctacatgatggatcagaataatattggtagcggttcaaccgttgctgagctgatgcagagtgccagtatttcgctgaaacaggcggaaaaaaactgggcggattacgaagcgttgccgcgtgacccgcgtcagagcaccgccgcagcggcagagatcaaacgtaattacgatatttatcacaatgcgctggcggagctgatccaactattaggtgcaggcaaaatcaacgagttctttgatcagccgacccagggatatcaggacggtttcgagaagcagtatgtggcttacatggagcaagacgatcggctctatgatatcgccgtcagcgataacaatgcctcctacagccaggcgatgtggattctggtgggcgtgatgatcgtcgtactggcggtcatcttcgccgtctggttcggtattaaagcctcgctggtagcgccaatgaatcgcctgattgacagcattcgtcatattgcaggcggcgatctggtgaaaccgattgaggtggatggctctaatgagatggggcaactggcagagagtttgcgccatatgcagggagagctgatgcgtaccgtcggtgatgtgcgcaacggggccaatgccatctatagcggtgccagcgaaatcgccaccggcaataacgatctctcttcgcgcaccgagcaacaggccgcttcgctggaagagacggcagccagcatggagcaactgaccgcaacggtgaaacagaacgccgagaatgcgcgtcaggccagccatctggcgttaagtgcttctgaaacggcgcaacgcggcggcaaagtggtggataacgtagtacagaccatgcgcgatatctccaccagttcgcagaaaatcgccgatattatcagcgtaattgacggcattgccttccagaccaatattctggctttgaacgcggcggttgaggctgcgcgtgcgggtgagcaagggcgcggttttgcggtggtcgcgggagaagtgcgtaatctggcccagcgcagcgcccaggcggctcgtgaaattaaaagcctgattgaagactcggtggggaaagtggatgttggctctacgctggtcgaaagcgccggggaaacaatggcggagattgtcagcgccgtgacccgcgtgacggacattatgggcgaaattgcttctgcttctgatgagcagagccgtggtatcgatcaggttggcttagcggttgctgagatggaccgggtaactcaacagaacgccgcgctggtggaagagtctgccgctgccgccgccgcgctggaagagcaggccagtcgcctgaccgaagcagtggcagtgttccggattcagcaacagcagcgtgaaacatcggctgtggtaaaaaccgtgacgccagctgcgccgcgtaaaatggccgtggcagatagcgaggagaactgggaaacattttaatcgccatgaaaatgcccgataagcaaaatgttatcgggcataaggagattaatctttacgtgggtcgttgatcggctgacgaaccaggaagatgtacgccagtgcccccgctgcggtgacgcaaccgcagatgattagtgccagacggaatgagtgggtggtatcaacaataaaaccagtaatgatcggcgcaaaagaggcgcagatgaagctggcaaagttctggatactgcccaccgacgcagtcatgcgagaagcaactgcgacgtggatcaagccccagcaggatgttccggcaaagtgaatacagaacagtgccatgccaatcagcagaaccgctgtcatggatgttgtcgcttgcggtacgaccagcgtaaaggcggcagaacagaacatcccggcaataatgcagatcttacggcttttaatcggagccattccccctttgaccagccagtcagtaacgtaaccgttgaccagcatcccggcagccccaaacaggaaagggatagccgccatcaaccctgtgctttttaaatccaggttataggctgtttgcaggtaaccaagaagccaggccagatacagccacgcagtgtagttgatgccactgaatccgagcatcattccccacattgtacggttacggaacaggctgcgccattcggcaaaactgagcggatctaggcgggcattgacgctacctgcattgagataagcttgctcaacggcagtcagttctacgtgctcgcggttgcgatagagcatataccagccgatggcgagaaaaatccccagtacaccaatggtaataaacatcccgcgccagcccatcaccagcatcatcgccgccagaatcggtgggtttacggcaacgccaatggtagaagctgcgttgaagaagcccatcgggcgtccgcgctctttgatgttgaaccagtcgttaatgacttttacaccgcatgggttcatcggcgcttcaccaatccccataccgatacgcaccaacacgaactgcgtaaagttgtacaccatgccagacattgcctggaacagtgaccagaagaacatccccagtctcagcatcaggcgtgggcctttacgatccaatagtgggccgcaaggaagttgcgcaatcccgtaagcgagtgaaaacacggagagcaaagcgccgatttcggtggcacttaatcccaattcttcacgaatcgttaaatttgctaccgacagcgaactgcggtcgagataattgattaccgccgcaaaaaataataacaacatggcggtggtttgaatgcgtttaattcgggtactgcgttgaactaatccatctggtggcacgggaatatctgccgacgaagatggagtaaatgaagaacgcggatcgatggtgatattttctttttccacgccggactcctgtatttataattttaattgtttacgtaattgtgcattacgcaaggttgacattaacggcaggttaaagttttaggactttactaccgctcacaaaaacatttttagtcgactgattgtgagcataggtaagcgggaatttcccggtatttatcttttgataaaaccgtgcacccgctaatagtttgctgtttttaatccgtacttaatgagcataacgcgtgttctcattaatggatcgaatcattgattgtttagctgaattcaaatggttacggagcgcaagggtggcatcaaggtcactgcggcaaatcagagcgctgagaatggtcatatgctcatcgacggcaatgatattgcgctgtttaagatcgctttcgtcccattgatagtgaaaatgaaagatgactgaaatgatctcaagcgattgatcaaaaaagatattgtcggcagccgaaagcagtaaggagtgaaaatctctgtcaagttgcgagaacatgcgaaagctattgccgatgttgtcacgcagtagccgatgacgttcgagcatggttttcgcctgcagccagcggggatcatgatcaggcaggttgagaaagtgctgaagtgaatgtgtttcgagcatttcgcgtagctcaaacagctgctcggcgtaggattgatcgaattgcttcatgctccactggccgcgcttttcgctgtgaataagattataacggccgaattttaaaagatattctcttactacaaccgggctgacacccgcggcccgcgccagttgcagttcagaaaatgtttcccctgggcgtaactggcgctggtttatcatcgtgaaaaaagcctgctcaaacactttgttttgttcactcattgaagcggtagtacaggcgaaaccgtcatcgtggtcaggtttacgcgcaataacatagtcgtttccaacctgcgtcaagacgccgcattcgcgtaaatggctgagaatatgacgcactgtggtgcggctgatgttgtacatttccgccagcgcactttgcgatggaagtggggaagggatatgaccccgcgccatatcatcaatgacctggttaatcacattgtggcgtaaattttgtgaacgactcatattttcctccttgtgagtccattaaaacccgatttaaaacatttttatgcgggtaatgactccaacttattgatagtgttttatgttcagataatgcccgatgactgtaggcctgataagacgcgacagcgtcgcatcaggcattgattgccggatgcggcacaagtgccttatccggcctacaggtcggcaacagttgtaggcctgataagacgcgacagcgtcgcatcaggcattgattgccggatgcggcgcgagcgccttatccggcctacgggtcgtgcatccgacaacaccgaatttacaggaacacagaacatgcaaaacattactcagtcctggtttgtccagggaatgatcaaagccaccaccgacgcctggctgaaaggctgggatgagcgcaacggcggcaacctgacgctacgcctggatgacgccgatatcgcaccatatcacgacaatttccaccaacaaccgcgctatatcccgctcagccagcccatgcctttactggcaaatacaccgtttattgtcaccggctcgggcaaattcttccgtaacgtccagcttgatcctgcggctaacttaggcatcgtaaaagtcgacagcgacggcgcgggctaccacattctttgggggttaaccaacgaagccgtccccacttccgaacttccggctcacttcctttcccactgcgagcgcattaaagccaccaacggcaaagatcgggtgatcatgcactgccacgccaccaacctgatcgccctcacctatgtacttgaaaacgacaccgcggtcttcactcgccaactgtgggaaggcagcaccgagtgtctggtggtattcccggatggcgttggcattttgccgtggatggtgcccggcacggacgaaatcggccaggcgaccgcacaagagatgcaaaaacattcgctggtgttgtggcccttccacggcgtcttcggcagcggaccgacgctggatgaaaccttcggtttaatcgacaccgcagaaaaatcagcacaagtattagtgaaggtttattcgatgggcggcatgaaacagaccatcagccgtgaagagttgatagcgctcggcaagcgtttcggcgttacgccactcgccagtgcgctggcgctgtaaggagcaaacatgatccgcaaagcctttgtcatgcaggtaaaccccgacgcccacgaagagtatcagcgtcggcataatcccatctggccagaactggaagcagtgctgaaatctcacggtgcgcataactacgccatctatctcgacaaagcgcgtaatctgctgtttgccatggtagagattgaatctgaagaacgctggaatgcggttgccagcactgatgtttgccaacgttggtggaaatatatgaccgatgttatgcccgctaacccggataacagcccggtgagtagcgagctgcaagaagtgttttacctgccgtaattgcccaatgtgccagagatgcctccggcacaatattttaaatttcgatttgaaaaattaaacatattacatctcccggtaagttatatttccctgatacattgtgagtaaatcacaaaaataatgaataacccattaatgattcatgtggtttatttaaataaccattatgtgcattactccgcaaatctgacctttcactctgtctcaaattgtcattgtttaccgacatatcgcctctcatcacttaatcgctccaccattacaattgattaaaatatattttatggagtccgattaatggcagctcttactgcaagctgtattgacctgaatattcagggcaatggcgcttattccgttctgaagcagttggcgacaatagcgttacaaaacggttttatcaccgactcacaccagttcctgcaaaccctgctgctgcgcgaaaaaatgcactctactggatttggttccggtgtcgccgtgccgcacggtaaaagcgcctgcgttaaacaaccgttcgtattattcgcccgcaaagcgcaggctattgactggaaagccagcgatggcgaagacgtcaattgctggatctgcctcggcgtgccgcaaagcggcgaagaggatcaggtcaaaatcatcggcacactgtgtcgcaaaattattcacaaggaatttattcatcaactgcaacagggcgataccgaccaggtgcttgccttgttaaatcaaaccctcagctcataaggaagtggcgatggagtcatccttacgtattgtcgcgatcaccaactgccccgccgggatcgctcacacctacatggtggcggaagccctggaacagaaagcccgttctctcggtcataccataaaagtggaaactcaagggtccagtggcgttgaaaaccgcttatccagcgaagagattgccgctgccgattacgtcattctcgctaccgggcgtggcctgagcggtgatgatcgcgcgcggtttgccgggaagaaagtttatgagattgccatctcccaggcgttgaaaaatatcgaccagattttcagcgaattaccgacaaactcgcagctttttgccgcagatagcggcgtgaagcttggcaaacaggaagtgcaaagcggtagcgtgatgagccacctgatggcgggcgtctctgcggcgctgccgtttgtcatcggcggtggtatcctggtggcgcttgccaacatgctggtgcagttcggtttgccgtataccgatatgtcgaaaggcgcgccgtcgtttacctgggtagttgaatccatcggttaccttggcttcacctttatgatccccatcatgggcgcttatattgcctcgtcgattgccgataaaccggctttcgctccggcgtttctggtttgctatctggcgaacgacaaagcgctgctcggcacccagtcgggtgcgggattcctcggcgcggtggtgctggggctggcgattggctatttcgtcttctggttccgcaaagtgcgccttggcaaagcattacaaccgctgctcggttcaatgctgatcccgttcgttactctgctggttttcggcgtgctcacttactacgttatcgggccggtgatgtccgacctcatgggcgggctgctccacttcctgaataccattcctccatcaatgaagtttgcggcagcgtttctggtcggtgcgatgctggcgttcgatatgggcggccccatcaataaaaccgcctggttcttctgcttctcactgctggaaaaacacatttatgactggtacgccatcgtcggcgttgtcgcgctgatgccgcccgtcgcggcgggtcttgcgacgttcattgcgcccaaactgtttacccgacaggaaaaagaggctgccagtagtgccattgtggtcggtgccacagtcgcaaccgaaccggctattccttacgctctggcagctccgttgccgatgattaccgccaatacgctggcgggcggcattaccggcgtgctggtgatcgctttcggaatcaaacgtctggcacctggtttgggtatctttgacccgctgatcggcctgatgtcgccggtgggttcgttttatctggtgctggcgattggcctcgcgctgaacatttcattcattatcgtcctgaaaggattgtggttacgccgcaaagcgaaagccgcgcaacaggagcttgtccatgaacattgagttactgcaacagttgtgcgaagccagcgccgtcagcggcgatgaacaggaagttcgcgacattctgataaacacgctggaaccttgcgtgaatgaaatcaccttcgatggtctgggcagctttgttgcccgtaaggggaataaaggtccaaaagttgccgttgtcggacatatggatgaagtcggctttatggtcacccacatcgacgagagcggttttctgcgttttaccaccattggcggctggtggaatcagtcgatgctcaaccaccgggtaaccatacgcacacacaagggagtgaaaatccctggtgtgattggttccgtcgcgcctcatgcgttaacggaaaagcaaaagcaacaaccgctgtcatttgatgagatgttcattgatattggcgcgaacagtcgcgaagaggtggaaaagcgcggcgtggaaattggtaattttattagcccggaagccaattttgcctgctggggcgaagataaagtggtcggcaaggcgttggataaccgcatcggctgcgcaatgatggctgaactattgcagacggtgaataatcccgaaattacgctgtatggcgttggcagtgtggaagaagaagttgggctacgcggggcgcaaacctcggcggaacacattaaaccggacgtcgtgatcgtgttggataccgccgtagcgggcgatgttccgggcattgataacattaaatacccgctgaaactgggccaggggccggggctgatgctgtttgacaagcgctacttccccaaccagaaactggtagcagcgttaaaaagctgtgccgcacataacgatttaccgctgcaattttccaccatgaaaaccggtgcgacggatggcgggcgctacaacgtgatgggcggcgggcgtccggttgtcgcgctgtgtctgccaactcgttatctgcacgccaacagcggtatgatttcaaaagccgattacgaagctctgctcacgctgatacggggttttctgacgaccttaactgcggagaaagtcaacgcgtttagccagttccgtcaggtggattaatgctaaacgaacgccagttaaagattgtcgatctgctggagcaacagccgcgcacgcctggcgagctggcgcaacagactggcgtttcaggcaggaccatcctgcgtgatattgactatctcaacttcacccttaacggcaaagcccgcattttcgccagtggcagtgcgggctatcagctggaaatcttcgagcgccgcagcttttttcagttgctgcaaaagcacgataacgacgatcggctgctggcgctgttattactgaatactttcactccccgtgcgcaactcgcctcggcgcttaatttgccagaaacgtgggtagcagagcgtctgccccggttaaaacagcgttatgaacgcacttgttgcctggccagccgccctggtttgggccatttcattgatgagacagaagagaaacgcgttatcttgctggcgaacttgctgcgcaaagatccgtttttaattccgctggcgggcataacacgagacaaccttcagcatttatccacggcctgcgacaaccaacaccgctggccgctcatgcagggtgattatctctccagcctgattctggcgatttacgccctgcgtaatcaactgaccgatgagtggccgcaatatcccggtgacgagataaaacaaatcgttgaacatagcggtctgtttcttggtgataacgctgtaagaaccctgacgggtttgatagagaaacagcatcagcaagcgcaggtaatttcagccgataatgtgcaggggttgctgcaaagggtgccgggcatcgcgtcattgaatattattgatgcgcagctggttgagaatattaccgggcatttattacgttgccttgccgcaccagtgtggattgctgagcaccgccagagcagcatgaataacctgaaagccgcctggcctgcggcctttgatatgagtctgcactttattacgctactgcgtgaacagctcgatattcctcttttcgacagcgatctgatcggtttgtattttgcctgtgcgctggaacggcatcaaaacgaacgccagccgatcattttgctctcggaccagaacgcgattgccaccattaatcagctcgccattgagcgcgatgttttacattgtcgggtgattattgcccgtagcttaagcgaacttgttgccattcgcgaagagattgagccgttattgatcattaacaacagccattatttactggatgacgcggtcaataattacatcaccgtaaaaaatatcattacggctgccggtatcgaacaaataaaacattttctggcgacggcatttattcgccagcaaccggagcgttttttctctgcccccggaagttttcattattcgaatgtacgcggtgaaagctggcaacatattacccggcaaatttgtgcgcaattagtggcacaacaccatattaccgccgatgaagcgcaacggatcatcgcccgcgaaggcgaaggtgaaaacctgattgttaatcgcctcgccatcccacattgctggagcgaacaggagcgacgttttcgtggattttttattaccctcgcccaaccagttgaggtgaataacgaagtcattaaccatgtcttgatcgcctgcgccgccgccgatgcgcgtcacgagttgaaaatattcagctatctggcaagcgtattgtgtcagcatccggcagaggttattgccgggttaacaggatatgaggcatttatggagttacttcacaaggggtgaactgtgtcggatgcgccgcatccgacactgcatttatcatcaaaaacgtttaacgcaggctattatagtcatcaaccatttcgttgtactcgcgtaatgctctcgggaaagagtcttcgaccatccagcttgagtttgcgtcctgaagttgctctttatcccagtcagagtacgggactttatctctgatgcggcgaacgtattttttagcctcgagttgatactggcctgccgaattaataaacgagaaattcatgccgcctttatccgcttctttggcctgcgccaccagcgtttccagttcagacactttcttcattgccgcttctgcatcaaacttatcttgcgatatcaggttattaatttgtttcgctgaaatcatgactgccagagagtagtagtggaatgttttcccttctctttcttcaatatttttcagttccgcaagctgacgcttatcattaatttcctgaatcgccgcatgataagattcggctacaggttcaaaggcttccagattttttaagaatgtctggtgcagcgttttccctttcgcaaacgggtaatgctgccaacttactgatttagtgtatgatggtgattttaaggtgcttgcaacatcgcaaaaaaaaacagcatgttatctgacgacttcttaatgcgacagagcccggacagatgctcagcgctcagttgcagaacgaacatcgctatcgcaaggggcagccgacctggggtgacgaagtgcgcctgtgctgggatgctgacagttgcgttgtgctgacggtataaggagcggcccatgagtacactagaacctccagcccgcgcagaaaaaacgggtggttttgcgaactggctggcgcgtatgcagatgaaccacggtcgcaagctggtgatcgccatgccatacgtgtggctgatcctgctgttcctgctgccgttcctgattgttttcaagataagcctcgcagaaatggcgcgggcgatcccgccttataccaacctgctggactgggccgacgggcagctcacgctgacgcttaatctcggcaacttcctgcagctgacggacgatccgctctatttcgaagcgtatttacagtcgttacaggtggcggcgatttcgacgatctgctgtctggtgatgggctacccgctggcctgggccgtggcgcacagtaagccgtcgacgcgtaacattttgctgttgctggtgatcctgccgtcgtggacctcgttcctgatccgcgtttacgcctggatggggatcctgaaaaacaacggcgtgctgaataacttcctgatgtggctcggagttatcgatcagccgctgacgatcctgcacaccaacctcgcggtctacatcggcattgtttacgcctatctgccgtttatggtgctgccgatttatacggcgctgacgcgtattgattactcgctggtggaagcgtcgcttgatctcggtgcgcgcccgttgaagaccttcttcagtgtgatcgtcccgctgaccaaaggcgggattattgccgggtcgatgctggtctttattccggcggtgggggagtttgtgatcccggaactgctcggcggcccggacagcatcatgattggtcgcgtgctgtggcaagagttctttaataaccgcgactggccggtggcgtctgcggtggcgattgtgatgttactcctgctgatcgtgccgatcatgtggttccacaagcatcagcagaaacagatgggagaccacggatgaacaacttaccggtagtgcgctccccgtggcgaattgcgatcctggtgattggctttaccttcctgtatgcgccaatgctgatgctggtgatctactccttcaacagctccaaactggtgacggtctgggctggctggtcgacgcgctggtacagcgagttgttccacgatgatgcgatgatgagcgcggtggggctgagcctgacgattgctgcgctggccgcaaccatggcgtcggtgctggggaccatcgctgcactggtgatggtgcgcttcgggcgttttcgcggttcgaacggctttgcttttatgatcaccgccccgctggttatgccggacgtgatcaccggtctggcgttgctgctgctgttcgtggcgctggcgcatgccatcggctggccggcggatcgcgggatgctcaccatctggctggcacacgtcactttctgtaccgcatacgtggcggtggtaatctcctcgcgtctgcgcgagctggatcgctccattgaagaggcggcgatggatcttggtgcgacgccgctgaaggtctttttcatcatcaccctgccgatgattatgccagcggtgatctcgggctggctgctggcgtttaccctgtcgctcgacgatctggttatcgccagctttgtttctggcccgggggcgacgacgctgccgatgctggtcttctccagcgtgcgcatgggggtgaacccggaaatcaacgccctggcctcgattattcttggcgtggtcggaattgtcggatttatcgcctggtatttgatggcgcgcgcggaaaaacagcgtgtgcgtgatatccagcgtgcaagacgcggctgaaggatttaaaatttccagtgatgtgccgcgtacgacgcggcactgtttttcagggaagtaaaacattgggattattaaagaaagcacgtcttacgcacgctcgtccaaatgttcctgcgctggttcaggtggcggcgctcgccattattatgatccgctgcctggatgtgctgatgattctgaacaccctgggcgcgcgcggcattggtgaatttattcaccgcagcgtgcagacgtggaatctgacgctggtctttctgagcagcctggtgctggtgtttatcgagatctactgcgccttttcgctggtgaaagggcgcaactgggcgcgctgggtctatctgctgacgcaaattaccgccgccagctatctgtgggccgcctcgctgggctatggctacccggagctgttcagcattgccggtgaatccaaacgcgaaatcctgcgcgcgctgtttatgcaaaaactgccggacatactggttctgttcctgctgtttgttccggcttccagtcggcggttcttccgcctgcaataatgtgtataatcgcagccctcgtgatttttaaggttttcatatgcagtgcgcactctatgacgccggtcgctgccgctcctgtcagtggatagaacagccggcctctcaacaactcaccgccaaaatggccgacctgcaacagctgctggcagcacacgcggtgggcgagtggtgcgcacccatcagcggcccggagcagggctttcgcaacaaagccaaaatggtggtcagcggcagcgtagaaaaaccgctgttggggatgctgcaccgcgacggcacgccggaagatttaactgactgcccgctttaccccgcctcatttgagcccgtctttgcggcactcaaaccgtttattgcgcgggccgggttaacgccttacaacgtcgcccgcaagcgcggcgagctgaaataccttctgctgacggaaagccagattgacggcggcatgatgctgcgtttcgtgctgcgttccgaaaccaagctggaacagcttcgcgcggcgctgccgtggttgcaggaacagcttgtgcagcttaaggtcattacggcaaatattcagccggtgcatatggcgatcatggaaggggaaaaagaggtcttcttcaccgaacagcacgcgctggcggagaatttcaacggtgtgccgctgtggatccgcccgcaaagcttcttccagaccaacccgactgtcgccagtgcgctgtacgccaccgcgcgcgactgggttcgggcgttaaacatccatcatatgtgggatctgttctgtggcgtggggggatttggcctgcactgcgccacgcctgagatgcagcttaccgggattgagatctctgctgaggcgattgcctgcgccagacagtccgccgctgagctggggttaacgaatctgcacttccaggcgctggactctacgcagttcgcgaccgggcagggtaatgtgccagagctggtactggtaaacccgccgcgccgtggcatcggacaagcgctatgcgactacctgaaccagatggcaccggattacatcgtctattcaagctgcaacgcgcagacgatggcgaaagatattgcgcatttgccgggttaccgcattgagcgcgttcagcttttcgatatgttcccgcacactgcgcactatgaagtgttgacgctactcgttaaacaataagcaaagcagccggagggaggttgcctccggctgcgatgagacttactggctcatggcgtcttttttacccatctcatcctttttcatgttgtccattttgcccattttgtctttccccatgtgatccttcttcatggcgtctttgcacatgtcgcccttacacattttatcgtgtggctgggacatgttgtcttttgccatcgtctctttgctcatggagtctgccgcctgcacatttgccataaacagagctgaaagcacggttgctgcaatgatcatttttttcatggtattcctcgtcgtttacgttgttgtattaactgccaccaaaccagttgtaaccctggtcttcccagtaaccgccggggaagcgattggtgatttcaatgacctgaatatgcttagggtttttgtaccccagcttggtcgggatacggagtttcatgggataaccgtactcaggagggaggatttggttatcccaggttagggcgagcagcgtttgcgggtgcaacgcggtcgccatatcaatgctggtgtagtaatcatccgcacagcggaagctgatgtatttggcgcgggtgtcggcaccgatcgcctgcagaaaatggcggaaggggattccaccccaacggccaatcgcgctccatccttccacgcaaatatggcgcgtgatctggtttacctgctgcatacgatacaactcaggcagggaccagctgcgggtgtctcgcaccaggccgcgaatggcgagttgataatcccggccgtcgacctgcggaatttggttgcgatcgtaaaaggcgttaaacgggaaagggcgggtgatgtcgctttcggtatattcaggtgccagatgacggtcgctgaacaggaaaccctggacacgatcgttaaagcgcgacattcgtgaaagtgcagtttcaacactggcgttgtcgctcaggtcacagcctgtaagcagcataatcccgcctaacgtcagcccctgtttaagaaagtgacgtcgctgtgcatttacggatttttcggcgtccttgaccagatattccgcgtcgcgggaagagagaaaggttggttttttcatgagatacccttagcgaccgcgcagcattgccagtaatgttttaggaacgagcagcaccataagcaggtggatcacgacaaacgcgacaatgaaggacatacaaaagaagtggatgtaacgtgcagtgtcatagcctcccagcagttcacgtaaaagcggaaactgaacggatttccaaataaccagcccggaaagcacaagcattacgccggttaatatggccagcaagtaggccagtttttgcaccatgttgtagtggttgagatcggcatgctgcagttttccccgcagggccagcgccatatccttgagcaaccccttaacagacaaagggaaaaaggtgcgtgcaaagcgcccggtgacaatacctaacgtgcagtagatcaggccgttaatacctaaaacccacatcatggcgaagtgccactgcagcgcgccgcccagccagcctcccagcgtgaaagaggacggaaaagtgaatgggaacaacggcgaggcgttataaattcgccatccgctgaataccatgccagccatggcgagggcattaatccagtgacacaccctgacccaaaggggatgaataacagctgttggcagagacatggtgacctcgttattccattgcgtggtcaaatcctaagataaattcggtcaccacatcctcacggaagtttaaataaaatgtgataactccggcgggcgttattaggtaagctcaactgtaatgaaacggcgtggatgtgggtcatgagtaacgcaaagaaaatattgctggtggaggacgatagcgatatcgccgccttcctgagcctgaacttaaaagatgaaggttttgagattgtgcacgaagccgatggcgaacgtgcgctgctccaactggaaaaacagcactgggatgccgtgatcctcgatctgatgctgcctggcgtggacgggctggagatctgtcgccgtatccgccagatgacccgctatctgcccgtcattatcatcagcgctcgcaccagcgagacgcaccgggtactgggtcttgagatgggggctgacgattatctgcctaaaccgttctccgttctggagctgattgctcgcgtcaaggcgctctttcgacgtcaggaagcgatggggcaaaatcttcgtctggaggcgggtattattcgctgtcacggcatggaaattgaccccctggcacgagaggttcgcctgcggggggaaaccattgacttgacccggctctgtcgcattaagaagtcgtcagataacatgctgtttttttttgcgatgttactgctctttaacaatttatcagacaatctgtgtgggcactcgaagatacggattcttaacgtcgcaagacgaaaaatgaataccaagtctcaagagtgaacacgtaattcattacgaagtttaattctttgagcatcaaacttttaaattgaagagtttgatcatggctcagattgaacgctggcggcaggcctaacacatgcaagtcgaacggtaacaggaaacagcttgctgtttcgctgacgagtggcggacgggtgagtaatgtctgggaaactgcctgatggagggggataactactggaaacggtagctaataccgcataacgtcgcaagaccaaagagggggaccctcgggcctcttgccatcggatgtgcccagatgggattagcttgttggtggggtaacggctcaccaaggcgacgatccctagctggtctgagaggatgaccagccacactggaactgagacacggtccagactcctacgggaggcagcagtggggaatattgcacaatgggcgcaagcctgatgcagccatgccgcgtgtatgaagaaggccttcgggttgtaaagtactttcagcggggaggaagggagtaaagttaatacctttgctcattgacgttacccgcagaagaagcaccggctaactccgtgccagcagccgcggtaatacggagggtgcaagcgttaatcggaattactgggcgtaaagcgcacgcaggcggtttgttaagtcagatgtgaaatccccgggctcaacctgggaactgcatctgatactggcaagcttgagtctcgtagaggggggtagaattccaggtgtagcggtgaaatgcgtagagatctggaggaataccggtggcgaaggcggccccctggacgaagactgacgctcaggtgcgaaagcgtggggagcaaacaggattagataccctggtagtccacgccgtaaacgatgtcgacttggaggttgtgcccttgaggcgtggcttccggagctaacgcgttaagtcgaccgcctggggagtacggccgcaaggttaaaactcaaatgaattgacgggggcccgcacaagcggtggagcatgtggtttaattcgatgcaacgcgaagaaccttacctggtcttgacatccacggaagttttcagagatgagaatgtgccttcgggaaccgtgagacaggtgctgcatggctgtcgtcagctcgtgttgtgaaatgttgggttaagtcccgcaacgagcgcaacccttatcctttgttgccagcggtccggccgggaactcaaaggagactgccagtgataaactggaggaaggtggggatgacgtcaagtcatcatggcccttacgaccagggctacacacgtgctacaatggcgcatacaaagagaagcgacctcgcgagagcaagcggacctcataaagtgcgtcgtagtccggattggagtctgcaactcgactccatgaagtcggaatcgctagtaatcgtggatcagaatgccacggtgaatacgttcccgggccttgtacacaccgcccgtcacaccatgggagtgggttgcaaaagaagtaggtagcttaaccttcgggagggcgcttaccactttgtgattcatgactggggtgaagtcgtaacaaggtaaccgtaggggaacctgcggttggatcacctccttaccttaaagaagcgttnnnnnnnnnnnnnnnnnnnnnnnnnnnnnnnnnnnnnnnnnnnnnnnnnnnnnnnnnnnnnnnnnnnnnnnnnnnnnnnnnnnnnnnnnnnnnnnnnnnnnnnnnnnnnnnnnnnnnnnnnnnnnnnnnnnnnnnnnnnnnnnnnnnnnnnnnnnnnnnnnnnnnnnnnnnnnnnnnnnnnnnnnnnnnnnnnnnnnnnnnnnnnnnnnnnnnnnnnnnnnnnnnnnnnnnnnnnnnnnnnnnnnnnnnnnnnnnnnnnnnnnnnnnnnnnnnnnnnnnnnnnnnnnnnnnnnnnnnnnnnnnnnnnnnnnnnnnnnnnnnnnnnnnnnnnnnnnnnnnnnnnnnnnnnnnnnnnnnnnnnnnnnnnnnnnnnnnnnnnnnnnnnnnnnnnnnnnnnnnnnnagtgaaacatcttcgggttgtgaggttaagcgactaagcgtacacggtggatgccctggcagtcagaggcgatgaaggacgtgctaatctgcgataagcgtcggtaaggtgatatgaaccgttataaccggcgatttccgaatggggaaacccagtgtgtttcgacacactatcattaactgaatccataggttaatgaggcgaaccgggggaactgaaacatctaagtaccccgaggaaaagaaatcaaccgagattcccccagtagcggcgagcgaacggggagcagcccagagcctgaatcagtgtgtgtgttagtggaagcgtctggaaaggcgcgcgatacagggtgacagccccgtacacaaaaatgcacatgctgtgagctcgatgagtagggcgggacacgtggtatcctgtctgaatatggggggaccatcctccaaggctaaatactcctgactgaccgatagtgaaccagtaccgtgagggaaaggcgaaaagaaccccggcgaggggagtgaaaaagaacctgaaaccgtgtacgtacaagcagtgggagcacgcttaggcgtgtgactgcgtaccttttgtataatgggtcagcgacttatattctgtagcaaggttaaccgaataggggagccgaagggaaaccgagtcttaactgggcgttaagttgcagggtatagacccgaaacccggtgatctagccatgggcaggttgaaggttgggtaacactaactggaggaccgaaccgactaatgttgaaaaattagcggatgacttgtggctgggggtgaaaggccaatcaaaccgggagatagctggttctccccgaaagctatttaggtagcgcctcgtgaattcatctccgggggtagagcactgtttcggcaagggggtcatcccgacttaccaacccgatgcaaactgcgaataccggagaatgttatcacgggagacacacggcgggtgctaacgtccgtcgtgaagagggaaacaacccagaccgccagctaaggtcccaaagtcatggttaagtgggaaacgatgtgggaaggcccagacagccaggatgttggcttagaagcagccatcatttaaagaaagcgtaatagctcactggtcgagtcggcctgcgcggaagatgtaacggggctaaaccatgcaccgaagctgcggcagcgacgctgatgcgttgttgggtaggggagcgttctgtaagcctgcgaaggtgtgctgtgaggcatgctggaggtatcagaagtgcgaatgctgacataagtaacgataaagcgggtgaaaagcccgctcgccggaagaccaagggttcctgtccaacgttaatcggggcagggtgagtcgacccctaaggcgaggccgaaaggcgtagtcgatgggaaacaggttaatattcctgtacttggtgttactgcgaaggggggacggagaaggctatgttggccgggcgacggttgtcccggtttaagcgtgtaggctggttttccaggcaaatccggaaaatcaaggctgaggcgtgatgacgaggcactacggtgctgaagcaacaaatgccctgcttccaggaaaagcctctaagcatcaggtaacatcaaatcgtaccccaaaccgacacaggtggtcaggtagagaataccaaggcgcttgagagaactcgggtgaaggaactaggcaaaatggtgccgtaacttcgggagaaggcacgctgatatgtaggtgaagtccctcgcggatggagctgaaatcagtcgaagataccagctggctgcaactgtttattaaaaacacagcactgtgcaaacacgaaagtggacgtatacggtgtgacgcctgcccggtgccggaaggttaattgatggggtcagcgcaagcgaagctcttgatcgaagccccggtaaacggcggccgtaactataacggtcctaaggtagcgaaattccttgtcgggtaagttccgacctgcacgaatggcgtaatgatggccaggctgtctccacccgagactcagtgaaattgaactcgctgtgaagatgcagtgtacccgcggcaagacggaaagaccccgtgaacctttactatagcttgacactgaacattgagccttgatgtgtaggataggtgggaggctttgaagtgtggacgccagtctgcatggagccgaccttgaaataccaccctttaatgtttgatgttctaacgttgacccgtaatccgggttgcggacagtgtctggtgggtagtttgactggggcggtctcctcctaaagagtaacggaggagcacgaaggttggctaatcctggtcggacatcaggaggttagtgcaatggcataagccagcttgactgcgagcgtgacggcgcgagcaggtgcgaaagcaggtcatagtgatccggtggttctgaatggaagggccatcgctcaacggataaaaggtactccggggataacaggctgataccgcccaagagttcatatcgacggcggtgtttggcacctcgatgtcggctcatcacatcctggggctgaagtaggtcccaagggtatggctgttcgccatttaaagtggtacgcgagctgggtttagaacgtcgtgagacagttcggtccctatctgccgtgggcgctggagaactgaggggggctgctcctagtacgagaggaccggagtggacgcatcactggtgttcgggttgtcatgccaatggcactgcccggtagctaaatgcggaagagataagtgctgaaagcatctaagcacgaaacttgccccgagatgagttctccctgactccttgagagtcctgaaggaacgttgaagacgacgacgttgataggccgggtgtgtaagcgcagcgatgcgttgagctaaccggtactaatgaaccgtgaggcttaaccttacaacgccgaagtgatggtgataccacgagctttttcttccggcgcgttatcgatctggtcgaatgcgcgagcagcaccgccgtaggttttagccagtacggtagtgattgcagcggtcagcgttgttttaccatggtcaacgtggccgatagtaccgacgttaacgtgcggttttgtacgttcaaacttttctttagacatcgattgtccctctaagacacggataaatcggtgatatcaccacatcaaccaggcaacatgcccgacttgttgaatgcaataaacagaaggaaaaaacagggaggagaaaagaagtggtgctgataggcagattcgaactgccgacctcacccttaccaagggtgcgctctaccaactgagctatatcagcacatcttggagcgggcagcgggaatcgaacccgcatcatcagcttggaaggctgaggtaatagccattatacgatgcccgcatcctggaactcggctacctgattttcattctgcactgaatatcgagagaagctctctttattcgagccggtaagcgaacttatcgtctcgggctacgccatcgcgtggccgaaattggtggtgggggaaggattcgaaccttcgaagtctgtgacggcagatttacagtctgctccctttggccgctcgggaaccccaccggacttgatggtgccgactaccggaatcgaactggtgacctactgattacaagtcagttgctctacctactgagctaagtcggcatcaagtagcgcgcattctatggagacatgcgagttcatgcaactaaaaaattgcataatttgttttattggtcacattttatgcgacacgatgaagaaacagccgaacggagggcagattagcacactttttcaacatcattgtgctcaacaatgcgctcctgctaaaccataattctttttatcagatggaatatctgtcacattgcttttcaacgatagcttcctggcagagattttttcttattattcctccccatctggtgttaccctcctgcccattaacccattcaacagaactgtgacgcgccatggcaaatatcgctttgccgatagagctatgaccgccagaaacatgcttatgagtataaaagagcaaacgttaatgacgccttacctacagtttgaccgcaaccagtgggcagctctgcgtgattccgtacctatgacgttatcggaagatgagatcgcccgtctcaaaggtattaatgaagatctctcgttagaagaagttgccgagatctatttacctttgtcacgtttgctgaacttctatataagctcgaatctgcgccgtcaggcagttctggaacagtttcttggtaccaacgggcaacgcattccttacattatcagtattgctggcagtgtcgcggtggggaaaagtacaaccgcccgtgtattgcaggcgctattaagccgttggccggaacatcgtcgtgttgaactgatcactacagatggcttccttcaccctaatcaggttctgaaagaacgtggtctgatgaagaagaaaggcttcccggaatcgtatgatatgcatcgcctggtgaagtttgtttccgatctcaaatccggcgtgccaaacgttacagcacctgtttactcacatcttatttatgatgtgatcccggatggagataaaacggttgttcagcctgatattttaattcttgaagggttaaatgtcttacagagcgggatggattatccacacgatccacatcatgtatttgtttctgattttgtcgatttttcgatatatgttgatgcaccggaagacttacttcagacatggtatatcaaccgttttctgaaattccgcgaaggggcttttaccgacccggattcctattttcataactacgcgaaattaactaaagaagaagcgattaagactgccatgacattgtggaaagagatcaactggctgaacttaaagcaaaatattctacctactcgtgagcgcgccagtttaatcctgacgaaaagtgctaatcatgcggtagaagaggtcagactacgcaaataatttgcaggggagcgaatactcccctttcttatttttctgcactacgcagggatatttcaccgcccatccagggttttattattccatcctgctcaagtaataaagccccctgtttgtctattccgcgtgaaatgccaaatatttctttatcaccaatgataagtttcactgggcgattaataaaattatccagcttttcccagcgcgacagataaggtgccaatccttcttgttcgaagagttccaacgcagcacgtaattcacgtattagcatggccgccaacgtattacgatcgagattgatccccgcttcctgcagcgtgatccacccctgattaacgacactctcttcaacacggcgcattgccatgttgatcccggctccaatgactatttgcgccgcatcgccagttttgccagtcagctccacaagaatgcctgccagcttgcgatcctgcagatagaggtcattaggccatttaacacgaactttatctgcacccagcttgcgtaatacttccgccatcacgataccgataaccagacttaaaccaatcgccgccgccgggccttgttccagacgccagaatatcgacaaatataagtttgcgccaaaaggcgaaaaccatttccgaccccggcgaccacggccagcctgctggtattctgcaatgcaagcatcgcccgatttaagctctccgatacgatcaagaaggtactgattcgtggagtcaatcactggcagcacggctacactaccgccatccagctgacccaatatctgtttagcattaagtaactggataggctcaggcaggctgtatcctttacccggaacggtaaagacatcaacgccccagtcacgcagtgtctgaatgtgtttattaatagccgcccggctcattcccagcgtttcacccaactgctcgccagagtgaaattcaccgttcgctaacagggcaatcaatttcagtggcacggtgttatccttcatgaaattgtctccactgcgctcacttcacctgatgcaccaataaagcggacttcaggctcaagccagacattaaatttttcaccaactttctgtcttacatgatgcgccagctgtacaacatcttcgctttttgcattgtcttcattaatgagaactaacgcctgttgacggtgcaccgcagccccacctatttgcatcccttttagctggcactgatcgataagccaacctgctgccagttttactgaaccatccgcctgggggtaatttggtgctgttggaaattgtgacagtaatgctttagccgtttcggcagatacaacagggtttttgaagaaactaccggcattgccattcacttttggatcagggagtttggtggtgcgcatatgacacaccgcattaaatacttgctgtggcgttactgttgtaggatccagacgagttaagtcaccatacgttagtacaggttgccactcttttggcagacgcagacctacggctacaatagcgaagcggtcctggtattcatgtttaaaaatactgtcgcgatagccaaaacggcactctttggcagttaagcgcacttgcttgcctgtcgccagttcaacagaatcaacataagcgcaaactcgctgtaattctacgccataagcaccaatattctggataggtgatgagccgacacaaccaggaattaatgccagattttccagaccaggcataccttcctgcaaagtgtattttaccagacgatgccagttttctccggctcctacatgtaaataccacgcatcaggttcatcatgaatttcgatacctttgatccggttgatgatcaccgtgccgcgatagtcctccagaaaaagtacattacttccttcacccagaataagaacgggttgtccttctgcggttgcatactgccaggcattgagtaattgttgttcgtcttcggcacatacaatgtgctgagcattatgctcaatgccaaatgtgttccagggttttaaggagtggttcatagctgctttcctgatgcaaaaacgaggctagtttaccgtatctgtggggggatggcttgtagatatgacgacaggaagagtttgtagaaacgcaaaaaggccatccgtcaggatggccttctgcttaatttgatgcctggcagtttatggcgggcgtcctgcccgccaccctccgggccgttgcttcgcaaacggtggagcaactggccagacaggtggagccggaatacacaccggcgcgaaaagttcatttttaccactgcgaccaccggggcctgccgctggcgctcatcagcgaagacggcaatacggcgtggcgcggggagtatgatgaatggggcaaccagcttaatgaggagaacccgcatcacctgcaccagccgtaccgtctgccagggcagcagcatgatgaggagtcggggctgtactataaccgtcaccggcactacgatccgttgcaggggcggtatattactcaggacccgattgggttgagaggtggatggaatatgtatcagtatccgttgaatcccatacaagtgatagacccaatggggttagatgcgattgagaatatgacatcaggtggactaatttatgccgtatctggtgtacctggattgattgctgcaaacagcattactaacagtgcttaccagttcggttatgatatggatgctattgttggcggagctcataatggggccgccgatgcaatgagacattgttacttgatgtgtcgaatgactaagacatttggatcaacaatagctgacgtgataggtaaaaatcatgaggcggcaggggatagacaaggtcagccagctaaagaaagaatcatggatcttaaaaataacactgtcggtattgcttgtggcgatttttctgccaaatgtagcgatgcatgtattgaaaaatataacactgggcaactcttcgggttagatggtataaaagcagataatccaataaaagcaaagcaagggagttcagatgcttcaaattattagaggcaaacttgtcatttttttaattaccctttgtttatttgttgtttaccttgggtttgataacaattcaaattctgacatcgtattttatggacataaaacaccaaagagcgttgagatatatctttctgaaaaaaatattatttataaaataattaatgaccaaaaaattagtagagggaatggtcattttataagtataatggttaataattacaggacgcactgtggagtggttgatataaatcttaattttttcaatgatattctttatagcgtgcgattaaaaaacattagtaaactggagaatatggagttctgcgctacaaaacaacgggtgtattttagtgataaaaacaagaaggctagttataaaataattaattatggagactattatgatgttgattattatgataacaatttgaaaaatgaagtttttgactggattggtaaatggtcataatgaacaacaccagaaagagaaaaatataaaatacatacagaaagacatgagagcaagggacggggcagggcaagatcatgaaaattgtgatgtaaatcacgattttcatctttgctttaacgcctacaggtgatccaaatttaacctttggaataactaaaaagataaaaaaggacgccaggtgagtattcaaagtttgcttgattatatttcagtgacccctgatatacgacaacaaggaaaggttaaacataaattatctgctattttgtttctcaccgtatgtgcagtaattgcaggtgccgatgagtggcaggaaattgaagattttggacatgaaagacttgaatggctaaagaaatatggtgattttgataatggcattccggtcgatgacaccattgcacgcgttgtgagtaacattgacagtttggcctttgaaaagatgtttattgaatggatgcaggagtgccatgaaatcactgatggtgaaattatagcaatagatggaaagaccataagaggctcctttgataagggaaaaagaaaaggagcaatccatatggtgagtgcattctcgaacgaaaatggtgttgtactggggcaggtgaaaacggaagccaaaagtaatgagattacagccattccagagttgcttaacctactgtatttaaagaaaaatttgataaccattgatgctatgggctgtcagaaagatatcgcttcgaagatcaaagataaaaaagcagattatcttctggcagtaaaaggcaatcaggggaaattacatcatgcattcgaggaaaaatttcctgtaaatgtgttttctaattataaaggcgattcgtttagtacgcaggagataagtcatggaagaaaagaaacacgtttgcatattgtcagtaacgtaacgcctgaacttttgtgattttgaattcgaatggaagggattaaaaaagctttgtgtagcattgtcattcaggcagaagaaagaagataaatcagcagaaggtgtaagcatccgatattatatttcatcaaaggatatggatgctaaagaatttgcacatgctatcagagcgcactggctgatcgagcacagtcttcattgggtgttagatgtaaaaatgaatgaagatgccagccggataagaagaggaaacgcagcctaaataatatctggaataaagaagatggcactgaatttattaagagattgcaaagacattaagggtgaagaggaaaagaaagaaggctgcgttaaacacagggaaagatcatcagaagttcactttttgtactaaataattcgcattttatgtttaaaaattgagatattccttccgatgaccagactgtgcattgttgagaacgcactaatgacatgaatcgctcccctgcggcgactcttgtcataagagtgccggagcgtttttccatcaattgcaatgacgtctttatcatttgatgaatggcaatcacgcatccagttaataaagcactcgtgaaattttgcaggactgatacaggatacaactctggcaatggtatcgtgaacaggaataccattttcaaaatcaccatattgcttcaagaaatcgagatgtgtttccccgaaatcctctatatcttcccaactttctgcaccagaaataacggcaaaaatagtcaatagtaggatgcctgacaatttatgctctactttccaggcttatctgtaatcgggaataatagaaatatgttccatcaattttttaagttccatttgttcaccttatttatgtaaggagtatttgatcatgtataagctatgaaaaacagctttaggtaataaggaatatctcaatttttaaacataaaatgcgaattatttagtacaaaaaagtagcgttacgtgatctttccctgggatacaactctggcaatggtatcgtgaacaggaataccattttcaaaatcaccatattgcttcaaaaaatcgagatgtgtttccccgaaatcctctatatcttcccaaccttctgcaccagaaataacggcacaaatagtcaacagtagaatatctgacaatttatgcaccactttccaggcttgtctgtaatcgggtgtaatagaaatatgttccatcaattttttaagttccatttgttcaccttatttatgtaaggagtatttgatcatgtataagctatgaaaaacagctttagacaataagtagtatctcaattgttgaacttaaaattcgaattatttagtacaaaaaagtagcgttacgtgatctttccctgcaaatggaacgcaaaataaacacctattccatgagttatataatttttcacaatgattaatttgttttctcaggaagagattttatttctcttcactacgaattagttcatgctgtatctttattaaacattcgtaagactcatttttgttcgggagatgtgctgtcattcgagcataagttggtttctcatctttaaaatattttaccatgattgaattatcaaggactgccaacaactgaactggatcactgctctttttttgatagatacccgctcttatataacttctaaaccgatcgccgagaaacgccgttttttctgctgtatttatcaactcctgcaacgttcctttgatggcatgattttcattaaggcgtagtgacccgacgcgaattaagagtctcgccccgcttggtgtgaatttattatttttacatgtacccagttctgtttgccaataatactcaccgatgtcctcattctgataccatctccacatggctttattatttaagacaggaaacgcggaaaaaatagtacccttagcgaaaatagtaaaacaatcatgatctttagcttgtatttcgcaatcagctataacaccaaaactaacaaatatcatcagcaaaaagaacaaaactcttttcattttcttattcctctcgatgttctctgtttcatcttagctaaaatttcacccaaatcatctatccctgctgttgctggcccatcgggtttattaatgtctgggaataaatagggttctgcacaagtatatcctggtggtaattgagttgttggccaatttgtctgtggcaggtaatcacttgctgtctttgtatccatccctggatactgggaatcatcctgtggcgtacaagtcagatttggttttacccacttcctgcaatacagtgtgtagtcgtaagggcttaatgctctgaagaatgttttgaaaacattaggcgcactactggcctggtcaataggatatggcagtcttaattgtttcgctatgtccggcaatttacttggatcgggcgtaggcggtttgttgggtctcgctccatatccgccattatttaagtgtccatattttgatgccagtcccattgaatctatatactgaaccggattcagcggatactgataaaaattccatccccccttcagcccaatcggatcctgagtgatatacctcccctgcagcgggtcataatagcggtggcggttgtaatacaggccggactccttgtcacgaacggtgcaatagtgatccacacccaacgcctgaaatcagatccagggggtaatctgctctcctgattcaggagagcttatggtcacttttgagacagttatggaaattaaaatcctgcacaagcagggaatgagtagccgggcgattgccagagaactggggatctcccgcaataccgttaaacgttatttgcaggcaaaatctgagccgccaaaatatacgccgcgacctgctgttgcttcactcctggatgaataccgggattatattcgtcaacgcatcgccgatgctcatccttacaaaatcccggcaacggtaatcgctcgcgagatcagagaccagggatatcgtggcggaatgaccattctcagggcattcattcgttctctctcggttcctcaggagcaggagcctgccgttcggttcgaaactgaacccggacgacagatgcaggttgactggggcactatgcgtaatggtcgctcaccgcttcacgtgttcgttgctgttctcggatacagccgaatgctgtacatcgaattcactgacaatatgcgttatgacacgctggagacctgccatcgtaatgcgttccgcttctttggtggtgtgccgcgcgaagtgttgtatgacaatatgaaaactgtggttctgcaacgtgacgcatatcagaccggtcagcaccggttccatccttcgctgtggcagttcggcaaggagatgggcttctctccccgactgtgtcgccccttcagggcacagactaaaggtaaggtggaacggatggtgcagtacacccgtaacagtttttacatcccactaatgactcgcctgcgcccgatggggatcactgtcgatgttgaaacagccaaccgccacggtctgcgctggctgcacgatgtcgctaaccaacgaaagcatgaaacaatccaggcacgtccctgcgatcgctggctcgaagagcagcagtccatgctggcactgcctccggagaaaaaagagtatgacgtgcatcttgatgaaaatctggtgaacttcgacaaacaccccctgcatcatccactctccatctacgactcattctgcagaggagtggcgtgatgatggaactgcaacatcaacgactgatggtgctcgccgggcagttgcaactggaaagccttataagcgcagcgcctgcgctgtcacaacaggcagtagaccaggaatggagttatatggacttcctggagcatctgcttcatgaagaaaaactggcacgtcatcaacgtaaacaggcgatgtatacccgaatggcagccttcccggcggtgaaaacgttcgaagagtatgacttcacattcgccaccggagcaccgcagaagcaactccagtcgttacgctcactcagcttcatagaacgtaatgaaaatatcgtattactggggccatcaggtgtggggaaaacccatctggcaatagcgatgggctatgaagcagtccgtgcaggtatcaaagttcgcttcacaacagcagcagatctgttacttcagttatctacggcacaacgtcagggccgttataaaacgacgcttcagcgtggagtaatggccccccgcctgctcatcattgatgaaataggctatctgccgttcagtcaggaagaagcaaagctgttcttccaggtcatcgctaaacgttacgaaaagagcgcaatgatcctgacatccaatctgccgttcgggcagtgggatcaaacgttcgcaggtgatgcagcactgacctcagcgatgctggaccgtatcttacaccactcacatgtcgttcaaatcaaaggagaaagctatcgactcagacagaaacgaaaggccggggttatagcagaagctaatcctgagtaaaacggtggatcaatattgggccgttggtggagatataagtggatcacttttcatccgtcgttgacagccacctgttagcattcctgtatacctgaaacgacaatgtttatctacgaactttaagaacacccaagataaaaattgtcaactatatcatatataacacattactaattcgaggctatatgaacagcatactgataatcacttctctccttatcatattcagcatttttagtcatgccctaataaaattagggattggcatatccaataacccagacaaaaccgatgtataagtcaacatatcctgaatcagacatacaatatcgcaatgaaaatcaataatattttaaggaatatcttcatgaaatcaaaagacaccctaaagtggttccctgcgcagcttcctgaagtaagaattatcctagggaatgctgtagtggaagtagcaaaacagggaagacctatcaataccagaacattgcttgattacattgaaggaaacataaagaaaaaatcatggctggataacaaagaattattacaaacagcgatatcagttcttaaagacaaccaaaatttaaatggtaaaatgtaatataataaacttacttttttatcatttttccactttaacaacattttgctccacttttccacgaccaaacaacttgaaatctggttaaaataacacgcaacactattcttcttccttgagtccgcccggaactcgaaaaacaaaccgagttaaagccatttttcacaaaatcgattttgtgtctcaccaaaattacggggttgcatacgcattcgtttattttcgaacgtgtacatacaaatatgcacaaaaataatcataattattttctgagatgcattatgatatgaacaccaatttcgtatagagtctcactatgtctcgaatttttgcttactgtcggatatcaacgctggatcagaccaccgaaaatcaacgccgggaaatcgaaagtgcaggttttaaaatcaaacctcagcaaataatcgaagaacacattagcggctcagcagcaaccagtgagcgtcctggttttaaccggttgcttgctcgcctgaaatgtggtgatcaattgattgtgacaaaactggatcgccttggttgtaatgcaatggatatcaggaaaacagtggaacaactgaccgaaacaggtatcagagtgcattgcttagcattgggtggcattgacctgaccagtccaacaggaaaaatgatgatgcaagtaatttcagcagtcgctgaatttgaacgagaccttttacttgaacgcactcattccgggatagtaagagcccgcggcgcagggaaacgttttggtcgaccacctgtgttaaatgaagaacagaaacaggtggtattcgaacgaattaagtcaggtgtaagtataagtgccattgcccgggaattcaaaacctcgcggcaaaccattttaagagccaaagcaaaacttcagacacctgacatataaaaaataatctcggtgtgagatgctttacgtcttccaagcccccttccttgccgtaaatggaaagatacatctaattatagaatttatatgttttaccctacggcagtgctggccattcaatatcctgtgcagttgacacccggtgcccttcgctgatatggctgatgtctgtcagccagccgcgttcgtcatactgccaccgctctgcggtttcgccattcacggtgcggtgcgtgaggcggtctgcttcgtcatagtgccagtgggtgaccagcccctcatcctcgctgcggataagtttgccggtcaggtcgtggtgataacgctgtgtgcggccgtcaaagccggtttcctgtatcagccggtcgagtacatcgtaacggaaggtggtgtggctgccgttttcactggtcaggcggatgacccgtccggcagcatcgtattccatactgcgcgtcagcccgccctgcgtggtacggacggcctttccccacgcatcgtactgtgtcccgtttctgctgccgtccggggcaatgacggcggtcaggtcaccggcgatgttgtattcataccgcgtttcatggccctgcgtgtctttcacggcaattaactgtccacggctgtcgtatgcgcggtactgactcagcccttcctcgcggtgcaccgccgtcatctgcccgaagcggtcatggtcataacgggttacataaccggaacagtcggtgaagctcagcaactgaccgtaacggctccacgtcatggttttccggctgccggtggcatcttccgttgcgcagggtaagtcactgtgtggattatcataacggtagcgggtgatatcgccgtcaggggcagtttcctgaatcagacggcccaattcatcatattcccggcgtatttccagcccgtcaggcccggtggctgacgttaactggctgtggtggttatagtaaaacgccgatgccctgccatccggcgtggtgatgcgcgtgatgaggcccgtcaccacatccgggctgtactctgttgtcctgcctgccgtatctgtctgtgccttaagcctgcccaccgcatcaaactgactctgcgtgacgctgccgtccgcgtgttcctttttcaccacccgcttcagcccggcttcgccctgcgtgtgcagcacttcacggcggttcaggctgtcggtgatggtgatgcggtccttctcatactgatacgtgtaacttaagcctgccgggtttagctgttctgtcacccgcccgtcgctgtcgtaacggtaacggatttccggccggcccgtgtgacggtgcgccaccatccggccccggtatttatcatcgtaagtaaagctgcgcacctgtttgccactacggtcatacaccaccgccagttcgccgcgcggcgtccagccatagcgtaccagcggcgcggcaggtaaattctccgggtattccgggtcgtgcgtcagccacacggcagacagacggatgccgttgtcccggccatattcggtgtaacccggcagggtatcaggaaaagcggacggttccgtcccgccggaaatggcctgctgccgggcttcttctgcccgctgcgcctgcgtggtcagtaccagccggaagtgacgcccggcaccatccgtcacgccggtgatttcgccgctgaattcaccggcggcttcgcggtgtaaaaaatcagcagcatacagtttactggcatgcatacgctaatgcgacagagccggatatccccgaacttctggattacgcccagtcatggcgggaaactgaacctgataatgaagatgcgccttattatgaatacgcgcaacgcgtctattgtggagaaggcgaaagcctgttggcagaactttgtgactactggcgcgagtatccctccacccaggcggatgctttaatgttgcaatggtgccgtcagcatcgggtcgattattacccattactggtgatgatgattgaagcgcgtgatctggttaacgatcagggaaaaccgctactttatgtccccggcgacagcgcccgtacgcgttttcatttatacgaaatactcagcgatgaaaaactctctgcgctggggcgttcactggtcgagatggttttgcacaaaggacgtaagccgcggatctcactcacgcgtgatacagaacataccttatggccattatatctagttgccaaacaattagtgcaggcctgccaacctacagaagaatcattaatgccgattgtgagccgccttgatgcagaaaatcgttgtccactggaagcattaattattcgtcgattattaattcaggcggcgaattttaccgagaagcaaactgttgaaccggagccgcaaccgcagccaatgcccgttgacgatggtgggccaggctgtctgggcatcattaaaattattttctatatttttatctttgctggtttgatagggaaaatactccatctgttcgggtgacagtcgacgttaatgtgcgggaagcccggcaagtaatctttccgcatttttgtaatgttgtttggcggccagttttaaccatttttgagattcataatggttaacattaatacctgagccatttctgtagatcaaacctaaagtatattgagcatgagcatacccttgttcagctgcttccttataccagagaattgctttacgggtgtcgggtttgacccccagacctttgaggtagatccaccccagtttactttgcgcgcgtggattttcctgttccgctgattgctcataccagtatctcgcctgtgtataatccagtggtttaccgtcgctaccatgaagataaaattctccaaggcgatattgcgacgttgagtgaccatgaatcgcggaaagctccgtggctgccgtggtgaatggaagactgcccggtgagcttaaataatcaaaggcataattcaccatggctttatcacgcaacgtcgttttcttgggttggctaatacaggtaattgctgcaactataaaaattgcgaatatatacattaattttttattcatgtgtgaatgcttcgattttctttttattttgaaagcgtcaagtttatactcatcaggtaatgctgccaacttactgatttagtgtatgatggtgattttaaggtgcttgcgtttgtactgaccccaaaaagttggacagttaaacacgaggcatataggtctgattccgatattcaattggagtcagaccttttaatttcaggctaattcttctgctgttgtagtattcaatatattccgtaacagcatccttcagttcgcttatattactgaactcatcaagataaaaacactccgactttaaggttccaaagaaacactccaccacagcattatccagacaattgccttttctggacatgctttgtttaataccatgttctttaaggatattttgatatcttctcatacgatactgccatccctggtcagagtgcagaacaggatgctcgtgaggattaagctttttgaatgcctgatcgagcatattctcaaccatgttcatcactggtctttccgaaaggctgtaagaaataacttcgttgttgaagagatctattactggagacaaatacagcttgcgcccattgactgcaaattcagtaacatcggtaacccacttctcgtttggccgcgtagccttgaaatctctttggagaacattaggggcggtttgccctacctctcctctgtaagagcggtatcgcttgaccttaatcgctgctttaagtgagagggttcccatcaggcgctgaacagctttatggttaatctgtttcccttctcgatgaagagacagcgttaccctacggtatccgtatcggcctctattctcgtgataaatctcactaatacgctttttaacgtccgcatacttgtcaggcttgctgagagcctttagatgataataaaacgtactgcgcggtatctccgcagccctgagaagctcatcaagaggataaaactgccttagctcgttgagtactttcactttttcgtgggatgagctaaggctttcagcttttttagatacataagccgcgtttcaagaaatcgaacttgcctttcaagatcctcaatgcgtcggtcttttgacagctccaatgctgatgccgctttttctggatcaactgatattgcaatgtttcttttggtgccaatcttgagcgcgcgtaaaccagcttctccgcgctcttcatagaccttcagccacctggctacagaaccactaccagcaagcataaagtgagcagcagcctgattaagggacatgtgctgctcgatcacagctttcacgaccttaatacgcaactctggatcagcactaacgcctttaggtttgggaattaaacctttttctccatgtttttcatagagggcaacccatgtcctgacctgggttcgggggacaccaaaacgtgccgagatgatcctgtaaccatcatcagttgtgaagtagtgattcacgacttcaaggcgcttttcaaaagggtattttggctttgacatattaggggctattccatttcatcgtccaacaaaatgggtgcagtacacccataagcgctaacttaagggttgaaccatctgaagaatgcgacgcctcggtgcctcgttaagacgatgcctcgcgttcttcaattgcgttttgtaggctgtcagggatactgtcccacgaatggccacctgtaagctccagatgaccatttttgttattctccacaacgagttagttcttcttttcggatccggcacttctgggggggaaatccagcgatggctggattatgtcgtcaattaaaaatgcggcgagtagattagcaaatatccacgctttcgcgagttcaggttcctttgcacgcaaagcatccaggtgcagcaaacttttgagccgcttaaaagccagttcaatttgccatcgcagacggtaacaatcagccacttgctctgctgaatattcatcttccggtaatgatgttagcaatagcacatggcccgctgcttccagcgtttccgcctgaactactcgtccttttcgacgattctcgctgagcagtcgggttttactgattaatgctttttcgggaggaagtgatacggcaatgagacgtgccggaaagggagctccggcttttttattacctgaattgcctatcattacagtggtttcaccgttcttaccgcaatccagcccgcgcagaaaacccatcatgtcaaagcgcattccttctgcagttaaccagcgcaatcctcgccagtgaacccggacgatataatcagcttctccaaaagcaagtgagcggatacattcgggacgcgaaccgaatccccggtcagcaatgcgtatctcgtctgccgtttgcgcaaatcggtccagccgttcagcgtctctgctgtcggttagctcaaaatcagtgaactgacaggtatgaggatcatatcccatatgtagtcgccattcagcgctgccgcccccgggcgcactgattgctgttccatcgacaagacgcaatctctttccgcttgtacaacccgtaactgcggcgcgtacagcaagtgtttgtgcggcaagtatgccaaaccagtcggcggcattccgcagccgcttcaggagagccacgtcagataatgttgcaacgtcatggagctgagcccatgcagtgacttcacgtaatgacatccccccggggccgtaagccagccccagacgtagcagagttgcagcatcacgaatttcgcggcggcgggttagagccccggcattacgtgccgaagtatccagttcttcgggcttaccaatatgggccagaattgctgaccagttatcgtgagagtaattcatcggcacgttaaatcatatcaggcgtaataccacaacccttaagttagcgcttatgggtggctgaccgggtgagtgaggaaagccgccgctggctggcatcgtgcggcctgacggtggcgcagatgcaaagccagatggacccggtatacacgccggcgcgaaaaattcacctgtaccactgcgaccatcgcggcctgccgctggcccttatcagcacggaagggacaacagcgtggtacgcagaatacgatgaatggggtaacctgctgaatgaagagaacccgcatcagctgcagcagcttatccgcctgccggggcagcagtatgatgaggagtccggcctgtattacaaccgccaccgctattatgacccgctgcaggggcgatatatcactcaggatccgattgggctgaaagggggatggaatttttatcagtatccgttgaatccgatctcaaatatagatccattaggattagaaacactaaaatgcattaagccactgcattcaatgggcggaactggtgaaagaagcggtccagatatatgggggaatccgttctatcatcaatatctttgtgtcccagatggtaaaggggactatacttgtggtggccaagaccaacggggagaatcaaaaggagatggtctatgggggccaggtaaagcaagtaatgatacaaaagaagctgctggccgttgtgacctcgttgaaaccgataatagttgtgtggagaactgtttaaaagggaagtttaaagaggtaaggccgcgttattctgtattgcctgatatattcacacctataaatttagggctatttaaaaactgccaagactggtctaatgattctttagaaacatgtaagatgaagtgctccggaaataacattggacgttttattagatttgtattcaccggagtgatgtaatgaaatatattattttgttattcagagctatatggctggctttatcgcttttaatactattcttttccatgcatagactttcactattagactccactcgtgatgtgagcgagttaattagtctcatgtcttatggaatgatggtaatatgttttccaacaggcatagtattctttattgctctaatatttatagggactgtatcagacattattggcgtaaggattgatagtaagtatattatggcgataataatatggctttattttctgtcaggagggtatattcaatggtttgtattaagtaagcgcattataaacaaataaattaagttaattgctcttattattatatgtaacctgggcattgatatcccgtatgccacagacccggcaggtaaccgcctgcccgacccggagctgcacccggacagcacgaattatatcttgatggcaacgctcgtcagaacctggccactttctgccagacctgggacgacgaaaacgtccataaattgatggatttgtcgatcaataaaaactggatcgacaaagaagaatatccgcaatccgcagccatcgacctgcgttgcgtaaatatggttgccgatctgtggcatgcgcctgcgccgaaaaatggtcaggccgttggcaccaacaccattggttcttccgaggcctgtatgctcggcgggatggcgatgaaatggcgttggcgcaagcgtatggaagctgcaggcaaaccaacggataaaccaaacctggtgtgcggtccggtacaaatctgctggcataaattcgcccgctactgggatgtggagctgcgtgagatccctatgcgccccggtcagttgtttatggacccgaaacgcatgattgaagcctgtgacgaaaacaccatcggcgtggtgccgactttcggcgtgacctacaccggtaactatgagttcccacaaccgctgcacgatgcgctggataaattccaggccgataccggtatcgacatcgacatgcacatcgacgctgccagcggtggcttcctggcaccgttcgtcgccccggatatcgtctgggacttccgcctgccgcgtgtgaaatcgatcagtgcttcaggccataaattcggtctggctccgctgggctgcggctgggttatctggcgtgacgaagaagcgctgccgcaggaactggtgttcaacgttgactacctgggtggtcaaattggtacttttgccatcaacttctcccgcccggcgggtcaggtaattgcacagtactatgaattcctgcgcctcggtcgtgaaggctataccaaagtacagaacgcctcttaccaggttgccgcttatctggcggatgaaatcgccaaactggggccgtatgagttcatctgtacgggtcgcccggacgaaggcatcccggcggtttgcttcaaactgaaagatggtgaagatccgggatacaccctgtatgacctctctgaacgtctgcgtctgcgcggctggcaggttccggccttcactctcggcggtgaagccaccgacatcgtggtgatgcgcattatgtgtcgtcgcggcttcgaaatggactttgctgaactgttgctggaagactacaaagcctccctgaaatatctcagcgatcacccgaaactgcagggtattgcccagcgttgagctaaccggtactaatgaaccgtgaggcttaaccttacaacgccgaagatgttttggcggattgagagaatttcagctttgattcagagtccgaaggattttgcgctgagacaaggcggcaaatgaagcgaaggaaggagcatactgaagtatgtgactgactttcgcgaatgcagccgacgcagtatcagcacaaaagacacaggacagagcacaggaatttgcctggcggccgtagcgcggtggtcccacctgaccccatgccgaactcagaagtgaaacgccgtagcgccgatggtagtgtggggtctccccatgcgagagtagggaactgccaggcatcaaattaagcagtaagccggtcataaaaccggtggttgtaaaagaattcggtggagcggtagttcagtcggttagaatacctgcctgtcacgcagggggtcgcgggttcgagtcccgtccgttccgccacttattaagaagcctcgagttaacgctcgaggttttttttcgtctgtatatctattattgccagaatcgcaaaaatcctctgcattttacgctctttttcctcaacagtctgaagcccataatcacctcagttaacgaaaatagcattaaaagaggcatattatggctatccctgcatttggtttaggtactttccgtctgaaagacgacgttgttatttcatctgtgaaaacggcgcttgaacttggttatcgcgcaattgatactgcacaaatctatgataacgaagccgcagtaggtcaggcgattgcagaaagtggcgtgccacgtcatgaactctacatcaccactaaaatctggattgaaaatctcagcaaagacaaattgatcccgagtctgaaagagagcctgcaaaaattgcgtactgattatgttgatctgactctaatccactggccgtcaccaaacgatgaagtctctgttgaagagtttatgcaggagctgctggaagccaaaaaagaagggttgacgcgtgagatcggtatttccaacttcacgatcccattgatggaaaaggcgattgctgctgttggcgctgaaaacatcgctactaactgtcaacgacggatgaaaagtgatccacttatatctccaccaacggcccaatattgccaccgctattatgacccgctgcaggggcgatatatcactcaggatccgattggactgaaggggggatggaacctgtatggatatcaattgaatccgatatcagacatcgaccccctgggtttatctatgtgggaggatgcaaaatcgggggcatgtactaatggtctttgcggcacactatccgctatgataggtccagataaatttgattctatagatagcaccgcatatgacgccttaaataaaataaatagccaatctatttgcgaagataaagagttcgctggtttaatatgtaaggataatagtggcagatatttctcaacagcacctaaccgaggagaaagaaaaggatcatatccattcaatagcccttgccctaatggtactgagaaagtatcagcttatcatactcatggtgcagatagtcatggagaatattgggacgaaatattttcaggtaaagatgagaaaatagttaaaagtaaagataacaatatcaagtcattttatttaggtacgcccagtggtaattttaaagcaatagataaccacgggaaggaaataacaaacagaaaaggattacctaatgtctgcagagttcatggtaatatgtaaaaaaatattgtttaggaactgtgtcattgtatctttgtttgtttttacatacaacacatgggcgcagtgtaataataatattaaaataatgcgcaagtatgaaagtgaaggtaaatataccgttagaaatttggttaaaaataaagctatagcattggaattagctgagatatatgttaagaatcgttatggacaggatgccgcagaagaagaaaaaccatacgaaatcactgagttaacaacaagttgggttgttgaaggtaccattcactcagaccaaattgctggtggggtttttattatagaaataggcaaaaatgatgggagaattctgaattttggccacggaaaataagtatgtaaggataatcaaacatcgtgtgcgctgatggcagagtaggtggaggactccagacagtcaaacgatagaaaaagatagcctttatggaggttcctgcaatgtcaaatacataccagaaaagaaaggcaagtaaagagtagcattcgaccagatcgataacgcgccggaagaaaaagctcgtggtatcaccatcaacacttctcacgttgaatacgacaccccgacccgtcactacgcacacgtagactgcccggggcacgccgactatgttaaaaacatgatcaccggtgctgcgcagatggacggcgcgatcctggtagttgctgcgactgacggcccgatgccgcagactcgtgagcacatcctgctgggtcgtcaggtaggcgttccgtacatcatcgtgttcctgaacaaatgcgacatggttgatgacgaagagctgctggaactggttgaaatggaagttcgtgaacttctgtctcagtacgacttcccgggcgacgacactccgatcgttcgtggttctgctctgaaagcgctggaaggcgacgcagagtgggaagcgaaaatcctggaactggctggcttcctggattcttacattccggaaccagagcgtgcgattgacaagccgttcctgctgccgatcgaagacgtattctccatctccggtcgtggtaccgttgttaccggtcgtgtagaacgcggtatcatcaaagttggtgaagaagttgaaatcgttggtatcaaagagactcagaagtctacctgtactggcgttgaaatgttccgcaaactgctggacgaaggccgtgctggtgagaacgtaggtgttctgctgcgtggtatcaaacgtgaagaaatcgaacgtggtcaggtactggctaagccgggcaccatcaagccgcacaccaagttcgaatctgaagtgtacattctgtccaaagatgaaggcggccgtcatactccgttcttcaaaggctaccgtccgcagttctacttccgtactactgacgtgactggtaccatcgaactgccggaaggcgtagagatggtaatgccgggcgacaacatcaaaatggttgttaccctgatccacccgatcgcgatggacgacggtctgcgtttcgcaatccgtgaaggcggccgtaccgttggcgcgggcgttgt
